United States Patent Application Publication US 2026/0327582 A1, published October 22, 2026 (application 19/643,937).

The application's sequence listing, which the Patent Office published only in electronic form, follows.

SEQUENCE LISTING (524 sequences)

SEQ ID NO: 1 - protein, 36 aa, Synthetic construct
EKSKNDRSKPQPSDDRDRQPPSGEDYPEWKAPGEYE

SEQ ID NO: 2 - protein, 34 aa, Synthetic construct
QEPKPQDQSSEVPPPPGSQKPGTKEPHDSKSSGP

SEQ ID NO: 3 - protein, 34 aa, Synthetic construct
PDNSSGQKLQLPQPSDKPQDSREKSDSLPSDKRD

SEQ ID NO: 4 - protein, 36 aa, Synthetic construct
PDNSTLQTLQLPQPTPSSTDTQQTSDTDPEDTTDVI

SEQ ID NO: 5 - protein, 30 aa, Synthetic construct
STSQSDGSSVPADIDQSSDSDQSSSQGQPG

SEQ ID NO: 6 - protein, 14 aa, Synthetic construct
AKPDDESQKPPQDD

SEQ ID NO: 7 - protein, 14 aa, Synthetic construct
LQLEPGPTTPEYPI

SEQ ID NO: 8 - protein, 14 aa, Synthetic construct
IQLPPSDTTPENPI

SEQ ID NO: 9 - protein, 12 aa, Synthetic construct
ESNDNSQVPPSL

SEQ ID NO: 10 - protein, 10 aa, Synthetic construct
SEQQEYPGSG

SEQ ID NO: 11 - protein, 10 aa, Synthetic construct
NNSEQQENPA

SEQ ID NO: 12 - protein, 12 aa, Synthetic construct
STDGSGQPKHKP

SEQ ID NO: 13 - protein, 20 aa, Synthetic construct
PKPSSESGERYEQQPEPPPP

SEQ ID NO: 14 - protein, 16 aa, Synthetic construct
KGGGGEPDEKRPSQSS

SEQ ID NO: 15 - protein, 14 aa, Synthetic construct
YAGGTPKEPPPPNS

SEQ ID NO: 16 - protein, 14 aa, Synthetic construct
PLVAGGTPFEPPPP

SEQ ID NO: 17 - protein, 14 aa, Synthetic construct
PQPDERSQIPDNKE

SEQ ID NO: 18 - protein, 10 aa, Synthetic construct
YTDEKPLPRS

SEQ ID NO: 19 - protein, 12 aa, Synthetic construct
SHPPQEPPQSNL

SEQ ID NO: 20 - protein, 16 aa, Synthetic construct
SESPSKQQPEPKSSKG

SEQ ID NO: 21 - protein, 16 aa, Synthetic construct
SESPTNQQPEPQWTTD

SEQ ID NO: 22 - protein, 16 aa, Synthetic construct
GGSKGPPPSPPPPQPE

SEQ ID NO: 23 - protein, 16 aa, Synthetic construct
GPLPAPPPQPPPPQPN

SEQ ID NO: 24 - protein, 14 aa, Synthetic construct
RPLPHDNNKQDYSK

SEQ ID NO: 25 - protein, 61 aa, Synthetic construct
SGGSGGSGGSGGSGGSGGSGGSGGSGGSGGSGGSGGSGGSGGSGGSGGSGGSGGSGGSGGS

SEQ ID NO: 26 - protein, 4 aa, Synthetic construct
SGGS

SEQ ID NO: 27 - protein, 100 aa, Synthetic construct
GGGGSGGGGSGGGGSGGGGSGGGGSGGGGSGGGGSGGGGSGGGGSGGGGSGGGGSGGGGSGGGGSGGGGSGGGGSGGGGSGGGGSGGGGSGGGGSGGGGS

SEQ ID NO: 28 - protein, 10 aa, Synthetic construct
SGGSGGSGGS

SEQ ID NO: 29 - protein, 16 aa, Synthetic construct
SGSETPGTSESATPES

SEQ ID NO: 30 - protein, 32 aa, Synthetic construct
SGGSSGGSSGSETPGTSESATPESSGGSSGGS

SEQ ID NO: 31 - protein, 4 aa, Synthetic construct
GSSG

SEQ ID NO: 32 - protein, 6 aa, Synthetic construct
GSSGSS

SEQ ID NO: 33 - protein, 8 aa, Synthetic construct
GSSGSSGS

SEQ ID NO: 34 - protein, 60 aa, Synthetic construct
GSSGSSGSSGSSGSSGSSGSSGSSGSSGSSGSSGSSGSSGSSGSSGSSGSSGSSGSSGSS

SEQ ID NO: 35 - protein, 62 aa, Synthetic construct
GSSGSSGSSGSSGSSGSSGSSGSSGSSGSSGSSGSSGSSGSSGSSGSSGSSGSSGSSGSSGS

SEQ ID NO: 36 - protein, 61 aa, Synthetic construct
GSSGSSGSSGSSGSSGSSGSSGSSGSSGSSGSSGSSGSSGSSGSSGSSGSSGSSGSSGSSG

SEQ ID NO: 37 - DNA, 1592 bp, Medicago truncatula
  source 1..1592: mol_type = genomic DNA
actgttaataatttttaaacgtcagcgcactaaaaaaacgaaaagacggacacgtgaaaataaaaaacacacactagtttatgacgcaatactattttacttatgatttgggtacattagacaaaaccgtgaaagagatgtatcagctatgaaacctgtatacttcaatacagagacttactcatatcggatacgtacgcacgaagtatcatattaattattttaatttttaataaatattttatcggatacttatgtgatactctacatatacacaaggatatttctaagatactttatagatacgtatcctagaaaaacatgaagagtaaaaaagtgagacaatgttgtaaaaattcattataaatgtatatgattcaattttagatatgcatcagtataattgattctcgatgaaacacttaaaattatatttcttgtggaagaacgtagcgagagaggtgattcagttagacaacattaaataaaattaatgttaagttcttttaatgatgtttctctcaatatcacatcatatgaaaatgtaatatgatttataagaaaatttttaaaaaatttattttaataatcacatgtactattttttaaaaattgtatcttttataataatacaataataaagagtaatcagtgttaatttttcttcaaatataagttttattataaatcattgttaacgtatcataagtcattaccgtatcgtatcttaatttttttttaaaaaccgctaattcacgtacccgtattgtattgtacccgcacctgtatcacaatcgatcttagttagaagaattgtctcgaggcggtgcaagacagcatataatagacgtggactctcttataccaaacgttgtcgtatcacaaagggttaggtaacaagtcacagtttgtccacgtgtcacgttttaattggaagaggtgccgttggcgtaatataacagccaatcgatttttgctataaaagcaaatcaggtaaactaaacttcttcattcttttcttccccatcgctacaaaaccggttcctttggaaaagagattcattcaaacctagcacccaattccgtttcaaggtataatctactttctattcttcgattattttattattattagctactatcgtttaatcgatcttttcttttgatccgtcaaatttaaattcaattagggttttgttcttttctttcatctgattgaaatccttctgaattgaaccgtttacttgattttactgtttattgtatgatttaatcctttgtttttcaaagacagtctttagattgtgattaggggttcatataaatttttagatttggatttttgtattgtatgattcaaaaaatacgtcctttaattagattagtacatggatattttttacccgatttattgattgtcagggagaatttgatgagcaagtttttttgatgtctgttgtaaattgaattgattataattgctgatctgctgcttccagttttcataacccatattcttttaaccttgttgtacacacaatgaaaaattggtgattgattcatttgtttttctttgttttggattatacagg

SEQ ID NO: 38 - DNA, 2000 bp, Zea mays
  source 1..2000: mol_type = genomic DNA
gtcgtgcccctctctagagataaagagcattgcatgtctaaagtataaaaaattaccacatatttttttgtcacacttatttgaagtgtagtttatctatctctatacatatatttaaacttcactctacaaataatatagtctataatactaaaataatattagtgttttagaggatcatataaataaactgctagacatggtctaaaggataattgaatattttgacaatctacagttttatctttttagtgtgcatgtgatctctctgttttttttgcaaatagcttgacctatataatacttcatccattttattagtacatccatttaggatttagggttgatggtttctatagactaatttttagtacatccattttattctttttagtctctaaattttttaaaactaaaactctattttagttttttatttaataatttagatataaaatgaaataaaataaattgactacaaataaaacaaataccctttaagaaataaaaaaactaagcaaacatttttcttgtttcgagtagataatgacaggctgttcaacgccgtcgacgagtctaacggacaccaaccagcgaaccagcagcgtcgcgtcgggccaagcgaagcagacggcacggcatctctgtagctgcctctggacccctctcgagagttccgctccaccgttggacttgctccgctgtcggcatccagaaattgcgtggcggagcggcagacgtgaggcggcacggcaggcggcctcttcctcctctcacggcaccggcagctacgggggattcctttcccaccgctccttcgctttcccttcctcgcccgccgtaataaatagacaccccctccacaccctctttccccaacctcgtgttcgttcggagcgcacacacacgcaaccagatctcccccaaatccagccgtcggcacctccgcttcaaggtacgccgctcatcctccccccccccctctctctaccttctctagatcggcgatccggtccatggttagggcccggtagttctacttctgttcatgtttgtgttagagcaaacatgttcatgttcatgtttgtgatgatgtggtctggttgggcggtcgttctagatcggagtaggatactgtttcaagctacctggtggatttattaattttgtatctgtatgtgtgtgccatacatcttcatagttacgagtttaagatgatggatggaaatatcgatctaggataggtatacatgttgatgcgggttttactgatgcatatacagagatgctttttttctcgcttggttgtgatgatatggtctggttgggcggtcgttctagatcggagtagaatactgtttcaaactacctggtggatttattaaaggataaagggtcgttctagatcggagtagaatactgtttcaaactacctggtggatttattaaaggatctgtatgtatgtgcctacatcttcatagttacgagtttaagatgatggatggaaatatcgatctaggataggtatacatgttgatgcgggttttactgatgcatatacagagatgctttttttcgcttggttgtgatgatgtggtctggttgggcggtcgttctagatcggagtagaatactgtttcaaactacctggtggatttattaattttgtatctttatgtgtgtgccatacatcttcatagttacgagtttaagatgatggatggaaatattgatctaggataggtatacatgttgatgtgggttttactgatgcatatacatgatggcatatgcggcatctattcatatgctctaaccttgagtacctatctattataataaacaagtatgttttataattattttgatcttgatatacttggatgatggcatatgcagcagctatatgtggattttttagccctgccttcatacgctatttatttgcttggtactgtttcttttgtccgatgctcaccctgttgtttggtgatacttc

SEQ ID NO: 39 - protein, 1228 aa, Synthetic construct
MSKLEKFTNCYSLSKTLRFKAIPVGKTQENIDNKRLLVEDEKRAEDYKGVKKLLDRYYLSFINDVLHSIKLKNLNNYISLFRKKTRTEKENKELENLEINLRKEIAKAFKGNEGYKSLFKKDIIETILPEFLDDKDEIALVNSFNGFTTAFTGFFDNRENMFSEEAKSTSIAFRCINENLTRYISNMDIFEKVDAIFDKHEVQEIKEKILNSDYDVEDFFEGEFFNFVLTQEGIDVYNAIIGGFVTESGEKIKGLNEYINLYNQKTKQKLPKFKPLYKQVLSDRESLSFYGEGYTSDEEVLEVFRNTLNKNSEIFSSIKKLEKLFKNFDEYSSAGIFVKNGPAISTISKDIFGEWNVIRDKWNAEYDDIHLKKKAVVTEKYEDDRRKSFKKIGSFSLEQLQEYADADLSVVEKLKEIIIQKVDEIYKVYGSSEKLFDADFVLEKSLKKNDAVVAIMKDLLDSVKSFENYIKAFFGEGKETNRDESFYGDFVLAYDILLKVDHIYDAIRNYVTQKPYSKDKFKLYFQNPQFMGGWDKDKETDYRATILRYGSKYYLAIMDKKYAKCLQKIDKDDVNGNYEKINYKLLPGPNKMLPKVFFSKKWMAYYNPSEDIQKIYKNGTFKKGDMFNLNDCHKLIDFFKDSISRYPKWSNAYDFNFSETEKYKDIAGFYREVEEQGYKVSFESASKKEVDKLVEEGKLYMFQIYNKDFSDKSHGTPNLHTMYFKLLFDENNHGQIRLSGGAELFMRRASLKKEELVVAPANSPIANKNPDNPKKTTTLSYDVYKDKRFSEDQYELHIPIAINKCPKNIFKINTEVRVLLKHDDNPYVIGIARGERNLLYIVVVDGKGNIVEQYSLNEIINNFNGIRIKTDYHSLLDKKEKERFEARQNWTSIENIKELKAGYISQVVHKICELVEKYDAVIALEDLNSGFKNSRVKVEKQVYQKFEKMLIDKLNYMVDKKSNPCATGGALKGYQITNKFESFKSMSTQNGFIFYIPAWLTSKIDPSTGFVNLLKTKYTSIADSKKFISSFDRIMYVPEEDLFEFALDYKNFSRTDADYIKKWKLYSYGNRIRIFRNPKKNNVFDWEEVCLTSAYKELFNKYGINYQQGDIRALLCEQSDKAFYSSFMALMSLMLQMRNSITGRTDVDFLISPVKNSDGIFYDSRNYEAQENAILPKNADANGAYNIARKVLWAIGQFKKAEDEKLDKVKIAISNKEWLEYAQTSVKH

SEQ ID NO: 40 - protein, 1227 aa, Synthetic construct
SKLEKFTNCYSLSKTLRFKAIPVGKTQENIDNKRLLVEDEKRAEDYKGVKKLLDRYYLSFINDVLHSIKLKNLNNYISLFRKKTRTEKENKELENLEINLRKEIAKAFKGNEGYKSLFKKDIIETILPEFLDDKDEIALVNSFNGFTTAFTGFFDNRENMFSEEAKSTSIAFRCINENLTRYISNMDIFEKVDAIFDKHEVQEIKEKILNSDYDVEDFFEGEFFNFVLTQEGIDVYNAIIGGFVTESGEKIKGLNEYINLYNQKTKQKLPKFKPLYKQVLSDRESLSFYGEGYTSDEEVLEVFRNTLNKNSEIFSSIKKLEKLFKNFDEYSSAGIFVKNGPAISTISKDIFGEWNVIRDKWNAEYDDIHLKKKAVVTEKYEDDRRKSFKKIGSFSLEQLQEYADADLSVVEKLKEIIIQKVDEIYKVYGSSEKLFDADFVLEKSLKKNDAVVAIMKDLLDSVKSFENYIKAFFGEGKETNRDESFYGDFVLAYDILLKVDHIYDAIRNYVTQKPYSKDKFKLYFQNPQFMGGWDKDKETDYRATILRYGSKYYLAIMDKKYAKCLQKIDKDDVNGNYEKINYKLLPGPNKMLPKVFFSKKWMAYYNPSEDIQKIYKNGTFKKGDMFNLNDCHKLIDFFKDSISRYPKWSNAYDFNFSETEKYKDIAGFYREVEEQGYKVSFESASKKEVDKLVEEGKLYMFQIYNKDFSDKSHGTPNLHTMYFKLLFDENNHGQIRLSGGAELFMRRASLKKEELVVHPANSPIANKNPDNPKKTTTLSYDVYKDKRFSEDQYELHIPIAINKCPKNIFKINTEVRVLLKHDDNPYVIGIARGERNLLYIVVVDGKGNIVEQYSLNEIINNFNGIRIKTDYHSLLDKKEKERFEARQNWTSIENIKELKAGYISQVVHKICELVEKYDAVIALEDLNSGFKNSRVKVEKQVYQKFEKMLIDKLNYMVDKKSNPCATGGALKGYQITNKFESFKSMSTQNGFIFYIPAWLTSKIDPSTGFVNLLKTKYTSIADSKKFISSFDRIMYVPEEDLFEFALDYKNFSRTDADYIKKWKLYSYGNRIRIFRNPKKNNVFDWEEVCLTSAYKELFNKYGINYQQGDIRALLCEQSDKAFYSSFMALMSLMLQMRNSITGRTDVDFLISPVKNSDGIFYDSRNYEAQENAILPKNADANGAYNIARKVLWAIGQFKKAEDEKLDKVKIAISNKEWLEYAQTSVKH

SEQ ID NO: 41 - protein, 1228 aa, Synthetic construct
MSKLEKFTNCYSLSKTLRFKAIPVGKTQENIDNKRLLVEDEKRAEDYKGVKKLLDRYYLSFINDVLHSIKLKNLNNYISLFRKKTRTEKENKELENLEINLRKEIAKAFKGNEGYKSLFKKDIIETILPEFLDDKDEIALVNSFNGFTTAFTGFFDNRENMFSEEAKSTSIAFRCINENLTRYISNMDIFEKVDAIFDKHEVQEIKEKILNSDYDVEDFFEGEFFNFVLTQEGIDVYNAIIGGFVTESGEKIKGLNEYINLYNQKTKQKLPKFKPLYKQVLSDRESLSFYGEGYTSDEEVLEVFRNTLNKNSEIFSSIKKLEKLFKNFDEYSSAGIFVKNGPAISTISKDIFGEWNVIRDKWNAEYDDIHLKKKAVVTEKYEDDRRKSFKKIGSFSLEQLQEYADADLSVVEKLKEIIIQKVDEIYKVYGSSEKLFDADFVLEKSLKKNDAVVAIMKDLLDSVKSFENYIKAFFGEGKETNRDESFYGDFVLAYDILLKVDHIYDAIRNYVTQKPYSKDKFKLYFQNPQFMGGWDKDKETDYRATILRYGSKYYLAIMDKKYAKCLQKIDKDDVNGNYEKINYKLLPGPNKMLPKVFFSKKWMAYYNPSEDIQKIYKNGTFKKGDMFNLNDCHKLIDFFKDSISRYPKWSNAYDFNFSETEKYKDIAGFYREVEEQGYKVSFESASKKEVDKLVEEGKLYMFQIYNKDFSDKSHGTPNLHTMYFKLLFDENNHGQIRLSGGAELFMRRASLKKEELVVHPANSPIANKNPDNPKKTTTLSYDVYKDKRFSEDQYELHIPIAINKCPKNIFKINTEVRVLLKHDDNPYVIGIARGERNLLYIVVVDGKGNIVEQYSLNEIINNFNGIRIKTDYHSLLDKKEKERFEARQNWTSIENIKELKAGYISQVVHKICELVEKYDAVIALEDLNSGFKNSRVKVEKQVYQKFEKMLIDKLNYMVDKKSNPCATGGALKGYQITNKFESFKSMSTQNGFIFYIPAWLTSKIDPSTGFVNLLKTKYTSIADSKKFISSFDRIMYVPEEDLFEFALDYKNFSRTDADYIKKWKLYSYGNRIRIFRNPKKNNVFDWEEVCLTSAYKELFNKYGINYQQGDIRALLCEQSDKAFYSSFMALMSLMLQMRNSITGRTDVDFLISPVKNSDGIFYDSRNYEAQENAILPKNADANGAYNIARKVLWAIGQFKKAEDEKLDKVKIAISNKEWLEYAQTSVKH

SEQ ID NO: 42 - protein, 1307 aa, Acidaminococcus sp.
MTQFEGFTNLYQVSKTLRFELIPQGKTLKHIQEQGFIEEDKARNDHYKELKPIIDRIYKTYADQCLQLVQLDWENLSAAIDSYRKEKTEETRNALIEEQATYRNAIHDYFIGRTDNLTDAINKRHAEIYKGLFKAELFNGKVLKQLGTVTTTEHENALLRSFDKFTTYFSGFYENRKNVFSAEDISTAIPHRIVQDNFPKFKENCHIFTRLITAVPSLREHFENVKKAIGIFVSTSIEEVFSFPFYNQLLTQTQIDLYNQLLGGISREAGTEKIKGLNEVLNLAIQKNDETAHIIASLPHRFIPLFKQILSDRNTLSFILEEFKSDEEVIQSFCKYKTLLRNENVLETAEALFNELNSIDLTHIFISHKKLETISSALCDHWDTLRNALYERRISELTGKITKSAKEKVQRSLKHEDINLQEIISAAGKELSEAFKQKTSEILSHAHAALDQPLPTTLKKQEEKEILKSQLDSLLGLYHLLDWFAVDESNEVDPEFSARLTGIKLEMEPSLSFYNKARNYATKKPYSVEKFKLNFQMPTLASGWDVNKEKNNGAILFVKNGLYYLGIMPKQKGRYKALSFEPTEKTSEGFDKMYYDYFPDAAKMIPKCSTQLKAVTAHFQTHTTPILLSNNFIEPLEITKEIYDLNNPEKEPKKFQTAYAKKTGDQKGYREALCKWIDFTRDFLSKYTKTTSIDLSSLRPSSQYKDLGEYYAELNPLLYHISFQRIAEKEIMDAVETGKLYLFQIYNKDFAKGHHGKPNLHTLYWTGLFSPENLAKTSIKLNGQAELFYRPKSRMKRMAHRLGEKMLNKKLKDQKTPIPDTLYQELYDYVNHRLSHDLSDEARALLPNVITKEVSHEIIKDRRFTSDKFFFHVPITLNYQAANSPSKFNQRVNAYLKEHPETPIIGIDRGERNLIYITVIDSTGKILEQRSLNTIQQFDYQKKLDNREKERVAARQAWSVVGTIKDLKQGYLSQVIHEIVDLMIHYQAVVVLENLNFGFKSKRTGIAEKAVYQQFEKMLIDKLNCLVLKDYPAEKVGGVLNPYQLTDQFTSFAKMGTQSGFLFYVPAPYTSKIDPLTGFVDPFVWKTIKNHESRKHFLEGFDFLHYDVKTGDFILHFKMNRNLSFQRGLPGFMPAWDIVFEKNETQFDAKGTPFIAGKRIVPVIENHRFTGRYRDLYPANELIALLEEKGIVFRDGSNILPKLLENDDSHAIDTMVALIRSVLQMRNSNAATGEDYINSPVRDLNGVCFDSRFQNPEWPMDADANGAYHIALKGQLLLNHLKESKDLKLQNGISNQDWLAYIQELRN

SEQ ID NO: 43 - protein, 1241 aa, Butyrivibrio proteoclasticus
MLLYENYTKRNQITKSLRLELRPQGKTLRNIKELNLLEQDKAIYALLERLKPVIDEGIKDIARDTLKNCELSFEKLYEHFLSGDKKAYAKESERLKKEIVKTLIKNLPEGIGKISEINSAKYLNGVLYDFIDKTHKDSEEKQNILSDILETKGYLALFSKFLTSRITTLEQSMPKRVIENFEIYAANIPKMQDALERGAVSFAIEYESICSVDYYNQILSQEDIDSYNRLISGIMDEDGAKEKGINQTISEKNIKIKSEHLEEKPFRILKQLHKQILEEREKAFTIDHIDSDEEVVQVTKEAFEQTKEQWENIKKINGFYAKDPGDITLFIVVGPNQTHVLSQLIYGEHDRIRLLLEEYEKNTLEVLPRRTKSEDARYDKFVNAVPKKVAKESHTFDGLQKMTGDDRLFILYRDELARNYMRIKEAYGTFERDILKSRRGIKGNRDVQESLVSFYDELTKFRSALRIINSGNDEKADPIFYNTFDGIFEKANRTYKAENLCRNYVTKSPADDARIMASCLGTPARLRTHWWNGEENFAINDVAMIRRGDEYYYFVLTPDVKPVDLKTKDETDAQIFVQRKGAKSFLGLPKALFKCILEPYFESPEHKNDKNCVIEEYVSKPLTIDRRAYDIFKNGTFKKTNIGIDGLTEEKFKDDCRYLIDVYKEFIAVYTRYSCFNMSGLKRADEYNDIGEFFSDVDTRLCTMEWIPVSFERINDMVDKKEGLLFLVRSMFLYNRPRKPYERTFIQLFSDSNMEHTSMLLNSRAMIQYRAASLPRRVTHKKGSILVALRDSNGEHIPMHIREAIYKMKNNFDISSEDFIMAKAYLAEHDVAIKKANEDIIRNRRYTEDKFFLSLSYTKNADISARTLDYINDKVEEDTQDSRMAVIVTRNLKDLTYVAVVDEKNNVLEEKSLNEIDGVNYRELLKERTKIKYHDKTRLWQYDVSSKGLKEAYVELAVTQISKLATKYNAVVVVESMSSTFKDKFSFLDEQIFKAFEARLCARMSDLSFNTIKEGEAGSISNPIQVSNNNGNSYQDGVIYFLNNAYTRTLCPDTGFVDVFDKTRLITMQSKRQFFAKMKDIRIDDGEMLFTFNLEEYPTKRLLDRKEWTVKIAGDGSYFDKDKGEYVYVNDIVREQIIPALLEDKAVFDGNMAEKFLDKTAISGKSVELIYKWFANALYGIITKKDGEKIYRSPITGTEIDVSKNTTYNFGKKFMFKQEYRGDGDFLDAFLNYMQAQDIAV

SEQ ID NO: 44 - protein, 1238 aa, Methanoplasma termitum
MNNYDEFTKLYPIQKTIRFELKPQGRTMEHLETFNFFEEDRDRAEKYKILKEAIDEYHKKFIDEHLTNMSLDWNSLKQISEKYYKSREEKDKKVFLSEQKRMRQEIVSEFKKDDRFKDLFSKKLFSELLKEEIYKKGNHQEIDALKSFDKFSGYFIGLHENRKNMYSDGDEITAISNRIVNENFPKFLDNLQKYQEARKKYPEWIIKAESALVAHNIKMDIVFSLEYFNKVLNQEGIQRYNLALGGYVTKSGEKMMGLNDALNLAHQSEKSSKGRIHMTPLFKQILSEKESFSYIPDVFTEDSQLLPSIGGFFAQIENDKDGNIFDRALELISSYAEYDTERIYIRQADINRVSNVIFGEWGTLGGLMREYKADSINDINLERTCKKVDKWLDSKEFALSDVLEAIDRTGNNDAFNEYISKMRTAREKIDAARKEMKFISEKISGDEESIHIIKTLLDSVQQFLHFFNLFKARQDIPLDGAFYAEFDEVHSKLFAIVPLYNKVRNYLTKNNLNTKKIKLNFKNPTLANGWDQNKVYDYASLIFLRDGNYYLGIINPKRKKNIKFEQGSGNGPFYRKMVYKQIPGPNKNLRPVFLTSTKGKKEYKPSKEIIEGYEADKHIRGDKFDLDFCHKLIDFFKESIEKHKDWSKFNFYFSPTESYGDISEFYLDVEKQGYRMHFENISAETIDEYVEKGDLFLFQIYNKDFVKAATGKKDMHTIYWNAAFSPENLQDVVVKLNGEAELFYRDKSDIKEIVHREGEILVNRTYNGRTPVPDKIHKKLTDYHNGRTKDLGEAKEYLDKVRYFKAHYDITKDRRYLNDKIYFHVPLTLNFKANGKKNLNKMVIEKFLSDEKAHIIGIDRGERNLLYYSIIDRSGKIIDQQSLNVIDGFDYREKLNQREIEMKDARQSWNAIGKIKDLKEGYLSKAVHEITKMAIQYNAIVVMEELNYGFKRGRFKVEKQIYQKFENMLIDKMNYLVFKDAPDESPGGVLNAYQLTNPLESFAKLGKQTGILFYVPAAYTSKIDPTTGFVNLFNTSSKTNAQERKEFLQKFESISYSAKDGGIFAFAFDYRKFGTSKTDHKNVWTAYTNGERMRYIKEKKRNELFDPSKEIKEALTSSGIKYDGGQNILPDILRSNNNGLIYTMYSSFIAAIQMRVYDGKEDYIISPIKNSKGEFFRTDPKRRELPIDADANGAYNIALRGELTMRAIAEKFDPDSEKMAKLELKHKDWFEFMQTRGD

SEQ ID NO: 45 - protein, 1281 aa, Eubacterium eligens
MNGNRSIVYREFVGVIPVAKTLRNELRPVGHTQEHIIQNGLIQEDELRQEKSTELKNIMDDYYREYIDKSLSGVTDLDFTLLFELMNLVQSSPSKDNKKALEKEQSKMREQICTHLQSDSNYKNIFNAKLLKEILPDFIKNYNQYDVKDKAGKLETLALFNGFSTYFTDFFEKRKNVFTKEAVSTSIAYRIVHENSLIFLANMTSYKKISEKALDEIEVIEKNNQDKMGDWELNQIFNPDFYNMVLIQSGIDFYNEICGVVNAHMNLYCQQTKNNYNLFKMRKLHKQILAYTSTSFEVPKMFEDDMSVYNAVNAFIDETEKGNIIGKLKDIVNKYDELDEKRIYISKDFYETLSCFMSGNWNLITGCVENFYDENIHAKGKSKEEKVKKAVKEDKYKSINDVNDLVEKYIDEKERNEFKNSNAKQYIREISNIITDTETAHLEYDDHISLIESEEKADEMKKRLDMYMNMYHWAKAFIVDEVLDRDEMFYSDIDDIYNILENIVPLYNRVRNYVTQKPYNSKKIKLNFQSPTLANGWSQSKEFDNNAIILIRDNKYYLAIFNAKNKPDKKIIQGNSDKKNDNDYKKMVYNLLPGANKMLPKVFLSKKGIETFKPSDYIISGYNAHKHIKTSENFDISFCRDLIDYFKNSIEKHAEWRKYEFKFSATDSYSDISEFYREVEMQGYRIDWTYISEADINKLDEEGKIYLFQIYNKDFAENSTGKENLHTMYFKNIFSEENLDKIIKLNGQAELFYRRASVKNPVKHKKDSVLVNKTYKNQLDNGDVVRIPIPDDIYNEIYKMYNGYIKESDLSEAAKEYLDKVEVRTAQKDIVKDYRYTVDKYFIHTPITINYKVTARNNVNDMVVKYIAQNDDIHVIGIDRGERNLIYISVIDSHGNIVKQKSYNILNNYDYKKKLVEKEKTREYARKNWKSIGNIKELKEGYISGVVHEIAMLIVEYNAIIAMEDLNYGFKRGRFKVERQVYQKFESMLINKLNYFASKEKSVDEPGGLLKGYQLTYVPDNIKNLGKQCGVIFYVPAAFTSKIDPSTGFISAFNFKSISTNASRKQFFMQFDEIRYCAEKDMFSFGFDYNNFDTYNITMGKTQWTVYTNGERLQSEFNNARRTGKTKSINLTETIKLLLEDNEINYADGHDIRIDMEKMDEDKKSEFFAQLLSLYKLTVQMRNSYTEAEEQENGISYDKIISPVINDEGEFFDSDNYKESDDKECKMPKDADANGAYCIALKGLYEVLKIKSEWTEDGFDRNCLKLPHAEWLDFIQNKRYE

SEQ ID NO: 46 - protein, 1300 aa, Francisella tularensis
MSIYQEFVNKYSLSKTLRFELIPQGKTLENIKARGLILDDEKRAKDYKKAKQIIDKYHQFFIEEILSSVCISEDLLQNYSDVYFKLKKSDDDNLQKDFKSAKDTIKKQISEYIKDSEKFKNLFNQNLIDAKKGQESDLILWLKQSKDNGIELFKANSDITDIDEALEIIKSFKGWTTYFKGFHENRKVNYSSNDIPTSIIYRIVDDNLPKFLENKAKYESLKDKAPEAINYEQIKKDLAEELTFDIDYKTSEVNQRVFSLDEVFEIANFNNYLNQSGITKFNTIIGGKFVNGENTKRKGINEYINLYSQQINDKTLKKYKMSVLFKQILSDTESKSFVIDKLEDDSDVVTTMQSFYEQIAAFKTVEEKSIKETLSLLFDDLKAQKLDLSKIYFKNDKSLTDLSQQVFDDYSVIGTAVLEYITQQIAPKNLDNPSKKEQELIAKKTEKAKYLSLETIKLALEEFNKHRDIDKQCRFEEILANFAAIPMIFDEIAQNKDNLAQISIKYQNQGKKDLLQASAEDDVKAIKDLLDQTNNLLHKLKIFHISQSEDKANILDKDEHFYLVFEECYFELANIVPLYNKIRNYITQKPYSDEKFKLNFENSTLANGWDKNKEPDNTAILFIKDDKYYLGVMNKKNNKIFDDKAIKENKGEGYKKIVYKLLPGANKMLPKVFFSAKSIKFYNPSEDILRIRNHSTHTKNGSPQKGYEKFEFNIEDCRKFIDFYKQSISKHPEWKDFGFRFSDTQRYNSIDEFYREVENQGYKLTFENISESYIDSVVNQGKLYLFQIYNKDFSAYSKGRPNLHTLYWKALFDERNLQDVVYKLNGEAELFYRKQSIPKKITHPAKEAIANKNKDNPKKESVFEYDLIKDKRFTEDKFFFHCPITINFKSSGANKFNDEINLLLKEKANDVHILSIDRGERHLAYYTLVDGKGNIIKQDTFNIIGNDRMKTNYHDKLAAIEKDRDSARKDWKKINNIKEMKEGYLSQVVHEIAKLVIEYNAIVVFEDLNFGFKRGRFKVEKQVYQKLEKMLIEKLNYLVFKDNEFDKTGGVLRAYQLTAPFETFKKMGKQTGIIYYVPAGFTSKICPVTGFVNQLYPKYESVSKSQEFFSKFDKICYNLDKGYFEFSFDYKNFGDKAAKGKWTIASFGSRLINFRNSDKNHNWDTREVYPTKELEKLLKDYSIEYGHGECIKAAICGESDKKFFAKLTSVLNTILQMRNSKTGTELDYLISPVADVNGNFFDSRQAPKNMPQDADANGAYHIGLKGLMLLGRIKNNQEGKKLNLVIKNEEYFEFVQNRNN

SEQ ID NO: 47 - protein, 1206 aa, Unidentified
MYYESLTKQYPVSKTIRNELIPIGKTLDNIRQNNILESDVKRKQNYEHVKGILDEYHKQLINEALDNCTLPSLKIAAEIYLKNQKEVSDREDFNKTQDLLRKEVVEKLKAHENFTKIGKKDILDLLEKLPSISEDDYNALESFRNFYTYFTSYNKVRENLYSDKEKSSTVAYRLINENFPKFLDNVKSYRFVKTAGILADGLGEEEQDSLFIVETFNKTLTQDGIDTYNSQVGKINSSINLYNQKNQKANGFRKIPKMKMLYKQILSDREESFIDEFQSDEVLIDNVESYGSVLIESLKSSKVSAFFDALRESKGKNVYVKNDLAKTAMSVIVFENWRTFDDLLNQEYDLANENKKKDDKYFEKRQKELKKNKSYSLEHLCNLSEDSCNLIENYIHQISDDIENIIINNETFLRIVINEHDRSRKLAKNRKAVKAIKDFLDSIKVLERELKLINSSGQELEKDLIVYSAHEELLVELKQVDSLYNMTRNYLTKKPFSTEKVKLNFNRSTLLNGWDRNKETDNLGVLLLKDGKYYLGIMNTSANKAFVNPPVAKTEKVFKKVDYKLLPVPNQMLPKVFFAKSNIDFYNPSSEIYSNYKKGTHKKGNMFSLEDCHNLIDFFKESISKHEDWSKFGFKFDTQASYNDISEFYREVEKQGYKLTYTDIDETYINDLIERNELYLFQIYNKDFSMYSKGKLNLHTLYFMMLFDQRNIDDVVYKLNGEAEVFYRPASISEDELIIHKAGEEIKNKNPNRARTKETSTFSYDIVKDKRYSKDKFTLHIPITMNFGVDEVKRFNDAVNSAIRIDENVNVIGIDRGERNLLYVVVIDSKGNILEQISLNSIINKEYDIETDYHALLDEREGGRDKARKDWNTVENIRDLKAGLYLQVVNVVAKLVLKYNAIICLEDLNFGFKRGRQKVEKQVYQKFEKMLIDKLNYLVIDKSREQTSPKELGGALNALQLTSKFKSFKELGKQSGVIYYVPAYLTSKIDPTTGFANLFYMKCENVEKSKRFFDGFDFIRFNALENVFEFGFDYRSFTQRACGINSKWTVCTNGERIIKYRNPDKNNMFDEKVVVVTDEMKNLFEQYKIPYEDGRNVKDMIISNEEAEFYRRLYRLLQQTLQMRNSTSDGTRDYIISPVKNKREAYFNSELSDGSVPKDADANGAYNIARKGLWVLEQIRQKSEGEKINLAMTNAEWLEYAQTHLL

SEQ ID NO: 48 - protein, 1233 aa, Unidentified
MDYGNGQFERRAPLTKTITLRLKPIGETRETIREQKLLEQDAAFRKLVETVTPIVDDCIRKIADNALCHFGTEYDFSCLGNAISKNDSKAIKKETEKVEKLLAKVLTENLPDGLRKVNDINSAAFIQDTLTSFVQDDADKRVLIQELKGKTVLMQRFLTTRITALTVWLPDRVFENFNIFIENAEKMRILLDSPLNEKIMKFDPDAEQYASLEFYGQCLSQKDIDSYNLIISGIYADDEVKNPGINEIVKEYNQQIRGDKDESPLPKLKKLHKQILMPVEKAFFVRVLSNDSDARSILEKILKDTEMLPSKIIEAMKEADAGDIAVYGSRLHELSHVIYGDHGKLSQIIYDKESKRISELMETLSPKERKESKKRLEGLEEHIRKSTYTFDELNRYAEKNVMAAYIAAVEESCAEIMRKEKDLRTLLSKEDVKIRGNRHNTLIVKNYFNAWTVFRNLIRILRRKSEAEIDSDFYDVLDDSVEVLSLTYKGENLCRSYITKKIGSDLKPEIATYGSALRPNSRWWSPGEKFNVKFHTIVRRDGRLYYFILPKGAKPVELEDMDGDIECLQMRKIPNPTIFLPKLVFKDPEAFFRDNPEADEFVFLSGMKAPVTITRETYEAYRYKLYTVGKLRDGEVSEEEYKRALLQVLTAYKEFLENRMIYADLNFGFKDLEEYKDSSEFIKQVETHNTFMCWAKVSSSQLDDLVKSGNGLLFEIWSERLESYYKYGNEKVLRGYEGVLLSILKDENLVSMRTLLNSRPMLVYRPKESSKPMVVHRDGSRVVDRFDKDGKYIPPEVHDELYRFFNNLLIKEKLGEKARKILDNKKVKVKVLESERVKWSKFYDEQFAVTFSVKKNADCLDTTKDLNAEVMEQYSESNRLILIRNTTDILYYLVLDKNGKVLKQRSLNIINDGARDVDWKERFRQVTKDRNEGYNEWDYSRTSNDLKEVYLNYALKEIAEAVIEYNAILIIEKMSNAFKDKYSFLDDVTFKGFETKKLAKLSDLHFRGIKDGEPCSFTNPLQLCQNDSNKILQDGVIFMVPNSMTRSLDPDTGFIFAINDHNIRTKKAKLNFLSKFDQLKVSSEGCLIMKYSGDSLPTHNTDNRVWNCCCNHPITNYDRETKKVEFIEEPVEELSRVLEENGIETDTELNKLNERENVPGKVVDAIYSLVLNYLRGTVSGVAGQRAVYYSPVTGKKYDISFIQAMNLNRKCDYYRIGSKERGEWTDFVAQLIN

SEQ ID NO: 49 - protein, 1227 aa, Unidentified
MSKLEKFTNCYSLSKTLRFKAIPVGKTQENIDNKRLLVEDEKRAEDYKGVKKLLDRYYLSFINDVLHSIKLKNLNNYISLFRKKTRTEKENKELENLEINLRKEIAKAFKGNEGYKSLFKKDIIETILPEFLDDKDEIALVNSFNGFTTAFTGFFDNRENMFSEEAKSTSIAFRCINENLTRYISNMDIFEKVDAIFDKHEVQEIKEKILNSDYDVEDFFEGEFFNFVLTQEGIDVYNAIIGGFVTESGEKIKGLNEYINLYNQKTKQKLPKFKPLYKQVLSDRESLSFYGEGYTSDEEVLEVFRNTLNKNSEIFSSIKKLEKLFKNFDEYSSAGIFVKNGPAISTISKDIFGEWNVIRDKWNAEYDDIHLKKKAVVTEKYEDDRRKSFKKIGSFSLEQLQEYADADLSVVEKLKEIIIQKVDEIYKVYGSSEKLFDADFVLEKSLKKNDAVVAIMKDLLDSVKSFENYIKAFFGEGKETNRDESFYGDFVLAYDILLKVDHIYDAIRNYVTQKPYSKDKFKLYFQNPQFMGGWDKDKETDYRATILRYGSKYYLAIMDKKYAKCLQKIDKDDVNGNYEKINYKLLPGPNKMLPKVFFSKKWMAYYNPSEDIQKIYKNGTFKKGDMFNLNDCHKLIDFFKDSISRYPKWSNAYDFNFSETEKYKDIAGFYREVEEQGYKVSFESASKKEVDKLVEEGKLYMFQIYNKDFSDKSHGTPNLHTMYFKLLFDENNHGQIRLSGGAELFMRRASLKKEELVVHPANSPIANKNPDNPKKTTTLSYDVYKDKRFSEDQYELHIPIANINKCPKNIFKINTEVRVLLKHDDNPYVIGIDRGERNLLYIVVVDGKGNIVEQYSLNEIINNFNGIRIKTDYHSLLDKKEKERFEARQNWTSIENIKELKAGYISQVVHKICELVEKYDAVIALEDLNSGFKNSRVKVEKQVYQKFEKMLIDKLNYMVDKKSNPCATGGALKGYQITNKFESFKSMSTQNGFIFYIPAWLTSKIDPSTGFVNLLKTKYTSIADKKFISSFDRIMYVPEEDLFEFALDYKNFSRTDADYIKKWKLYSYGNRIRIFRNPKKNNVFDWEEVCLTSAYKELFNKYGINYQQGDIRALLCEQSDKAFYSSFMALMSLMLQMRNSITGRTDVDFLISPVKNSDGIFYDSRNYEAQENAILPKNADANGAYNIARKVLWAIGQFKKAEDEKLDKVKIASNKEWLEYAQTSVKH

SEQ ID NO: 50 - protein, 1264 aa, Leptospira inadai
MEDYSGFVNIYSIQKTLRFELKPVGKTLEHIEKKGFLKKDKIRAEDYKAVKKIIDKYHRAYIEEVFDSVLHQKKKKDKTRFSTQFIKEIKEFSELYYKTEKNIPDKERLEALSEKLRKMLVGAFKGEFSEEVAEKYNKNLFSKELIRNEIEKFCETDEERKQVSNFKSFTTYFTGFHSNRQNIYSDEKKSTAIGYRIIHQNLPKFLDNLKIIESIQRRFKDFPWSDLKKNLKKIDKNIKLTEYFSIDGFVNVLNQKGIDAYNTILGGKSEESGEKIQGLNEYINLYRQKNNIDRKNPLNVKILFKQILGDRETKSFIPEAFPDDQSVLNSITEFAKYLKLDKKKKSIIAELKKFLSSFNRYELDGIYLANDNSLASISTFLFDDWSFIKKSVSFKYDESVGDPKKKIKSPLKYEKEKEKWLKQKYYTISFLNDAIESYSKSQDEKRVKIRLEAYFAEFKSKDDAKKQFDLLERIEEAYAIVEPLLGAEYPRDRNLKADKKEVGKIKDFLDSIKSLQFFLKPLLSAEIFDEKDLGFYNQLEGYYEEIDISGHLYNKVRNYLTGKIYSKEKFKLNFENSTLLKGWDENREVANLCVIFREDQKYYLGVMDKENNTILSDIPKVKPNELFYEKMVYKLIPTPHMQLPRIIFSSDNLSIYNPSKSILKIREAKSFKEGKNFKLKDCHKFIDFYKESISKNEDWSRFDFKFSKTSSYENISEFYREVERQGYNLDFKKVSKFYIDSLVEDGKLYLFQIYNKDFSIFSKGKPNLHTIYFRSLFSKENLKDVCLKLNGEAEMFFRKKSINYDEKKKREGHHPELFEKLKYPILKDKRYSEDKFQFHLPISLNFKSKERLNFNLKVNEFLKRNKDINIIGIDRGERNLLYLVMINQKGEILKQTLLDSMQSGKGRPEINYKEKLQEKEIERDKARKSWGTVENIKELKEGYLSIVIHQISKLMVENNAIVVLEDLNIGFKRGRQKVERQVYQKFEKMLIDKLNFLVFKENKPTEPGGVLKAYQLTDEFQSFEKLSKQTGFLFYVPSWNTSKIDPRTGFIDFLHPAYENIEKAKQWINKFDSIRFNSKMDWFEFTADTRKFSENLMLGKNRVWVICTTNVERYFTSKTANSSIQYNSIQITEKLKELFVDIPFSNGQDLKPEILRKNDAVFFKSLLFYIKTTLSLRQNNGKKGEEEKDFILSPVVDSKGRFFNSLEASDDEPKDADANGAYHIALKGLMNLLVLNETKEENLSRPKWKIKNKDWLEFVWERNR

SEQ ID NO: 51 - protein, 1373 aa, Moraxella bovoculi
MLFQDFTHLYPLSKTVRFELFIDRTLEHIHAKNFLSQDETMADMHQKVKVILDDYHRDFIADMMGEVKLTKLAEFYDVYLKFRKNPKDDELQKAQLKDLQAVLRKEIVKPIGNGGKYKAGYDRLFGAKLFKDGKELGDLAKFVIAQEGESSPKLAHLAHFEKFSTYFTGFHDNRKNMYSDEDKHTAIAYRLIHENLPRFIDNLQILTTIKQKHSALYDQIINELTASGLDVSLASHLDGYHKLLTQEGITAYNTLLGGISGEAGSPKIQGINELINSHHNQHCHKSERIAKLRPLHKQILSDGMSVSFLPSKFADDSEMCQAVNEFYRHYADVFAKVQSLFDGFDDHQKDGIYVEHKNLNELSKQAFGDFALLGRVLDGYYVDVVNPEFNERFAKAKTDNAKAKLTKEKDKFIKGVHSLASLEQAIEHYTARHDDESVQAGKLGQYFKHGLAGVDNPIQKIHNNHSTIKGFLERERPAGERALPKIKSGKNPEMTQLRQLKELLDNALNVAHFAKLLTTKTTLDNQDGNFYGEFGVLYDELAKIPTLYNKVRDYLSQKPFSTEKYKLNFGNPTLLNGWDLNKEKDNFGVILQKDGCYYLALLDKAHKKVFDNAPNTGKSIYQKMIYKYLEVRKQFPKVFFSKEAIAINYHPSKELVEIKDKGRQRSDDERLKLYRFILECLKIHPKYDKKFEGAIGDIQLFKKDKKGREVPISEKDLFKDINGIFSSKPKLEMEDFFIGEFKRYNPSQDLVDQYNIYKKIDSNDNRKKENFYNNHPKFKKDLVRYYYESMCKHEEWEESFEFSKKLQDIGCYVDVNELFTEIETRRLNYKISFCNINADYIDELVEQGQLYLFQIYNKDFSPKAHGKPNLHTLYFKALFSEDNLADPIYKLNGEAQIFYRKASLDMNETTIHRAGEVLENKNPDNPKKRQFVYDIIKDKRYTQKDFMLHVPITMNFGVQGMTIKEFNKKVNQSIQQYDEVNVIGIDRGERHLLYLTVINSKGEILEQCSLNDITTASANGTQMTTPYHKILDKREIERLNARVGWGEIETIKELKSGYLSHVVHQISQLMLKYNAIVVLEDLNFGFKRGRFKVEKQIYQNFENALIKKLNHLVLKDKADDEIGSYKNALQLTNNFTDLKSIGKQTGFLFYVPAWNTSKIDPETGFVDLLKPRYENIQASQAFFGKFDKICYNADKDYFEFHIDYAKFTDKAKNSRQIWTICSHGDKRYVYDKTANQNKGAAKGINVNDILKSLFARHHINEKQPNLVMDICQNNDKEFHKSLMYLLKTLLALRYSNASSDEDFILSPVANDEGVFFNSALADDTQPQNADANGAYHIALKGLWLLNELKNSDDLNKVKLAIDNQTWLNFAQNR

SEQ ID NO: 52 - protein, 1352 aa, Unidentified
MENIFDQFIGKYSLSKTLRFELKPVGKTEDFLKINKVFEKDQTIDDSYNQAKFYFDSLHQKFIDAALASDKTSELSFQNFADVLEKQNKIILDKKREMGALRKRDKNAVGIDRLQKEINDAEDIIQKEKEKIYKDVRTLFDNEAESWKTYYQEREVDGKKITESKADLKQKGADFLTAAGILKVLKYEFPEEKEKEFQAKNQPSLFVEEKENPGQKRYIFDSFDKFAGYLTKFQQTKKNLYAADGTSTAVATRIADNFIIFHQNTKVFRDKYKNNHTDLGFDEENIFEIERYKNCLLQREIEHIKNENSYNKIIGRINKKIKEYRDQKAKDTKLTKSDFPFFKNLDKQILGEVEKEKQLIEKTREKTEEDVLIERFKEFIENNEERFTAAKKLMNAFCNGEFESEYEGIYLKNKAINTISRRWFVSDRDFELKLPQQKSKNKSEKNEPKVKKFISIAEIKNAVEELDGDIFKAVFYDKKIIAQGGSKLEQFLVIWKYEFEYLFRDIERENGEKLLGYDSCLKIAKQLGIFPQEKEAREKATAVIKNYADAGLGIFQMMKYFSLDDKDRKNTPGQLSTNFYAEYDGYYKDFEFIKYYNEFRNFITKKPFDEDKIKLNFENGALLKGWDENKEYDFMGVILKKEGRLYLGIMHKNHRKLFQSMGNAKGDNANRYQKMIYKQIADASKDVPRLLLTSKKAMEKFKPSQEILRIKKEKTFKRESKNFSLRDLHALIEYYRNCIPQYSNWSFYDFQFQDTGKYQNIKEFTDDVQKYGYKISFRDIDDEYINQALNEGKMYLFEVVNKDIYNTKNGSKNLHTLYFEHILSAENLNDPVFKLSGMAEIFQRQPSVNEREKITTQKNQCILDKGDRAYKYRRYTEKKIMFHMSLVLNTGKGEIKQVQFNKIINQRISSSDNEMRVNVIGIDRGEKNLLYYSVVKQNGEIIEQASLNEINGVNYRDKLIEREKERLKNRQSWKPVVKIKDLKKGYISHVIHKICQLIEKYSAIVVLEDLNMRFKQIRGGIERSVYQQFEKALIDKLGYLVFKDNRDLRAPGGVLNGYQLSAPFVSFEKMRKQTGILFYTQAEYTSKTDPITGFRKNVYISNSASLDKIKEAVKKFDAIGWDGKEQSYFFKYNPYNLADEKYKNSTVSKEWAIFASAPRIRRQKGEDGYWKYDRVKVNEEFEKLLKVWNFVNPKATDIKQEIIKKIKAGDLQGEKELDGRLRNFWHSFIYLFNLVLELRNSFSLQIKIKAGEVIAVDEGVDFIASPVKPFFTTPNPYIPSNLCWLAVENADANGAYNIARKGVMILKKIREHAKKDPEFKKLPNLFISNAEWDEAARDWGKYAGTTALNLDH

SEQ ID NO: 53 - protein, 1260 aa, Porphyromonas crevioricanis
MDSLKDFTNLYPVSKTLRFELKPVGKTLENIEKAGILKEDEHRAESYRRVKKIIDTYHKVFIDSSLENMAKMGIENEIKAMLQSFCELYKKDHRTEGEDKALDKIRAVLRGLIVGAFTGVCGRRENTVQNEKYESLFKEKLIKEILPDFVLSTEAESLPFSVEEATRSLKEFDSFTSYFAGFYENRKNIYSTKPQSTAIAYRLIHENLPKFIDNILVFQKIKEPIAKELEHIRADFSAGGYIKKDERLEDIFSLNYYIHVLSQAGIEKYNALIGKIVTEGDGEMKGLNEHINLYNQQRGREDRLPLFRPLYKQILSDREQLSYLPESFEKDEELLRALKEFYDHIAEDILGRTQQLMTSISEYDLSRIYVRNDSQLTDISKKMLGDWNAIYMARERAYDHEQAPKRITAKYERDRIKALKGEESISLANLNSCIAFLDNVRDCRVDTYLSTLGQKEGPHGLSNLVENVFASYHEAEQLLSFPYPEENNLIQDKDNVVLIKNLLDNISDLQRFLKPLWGMGDEPDKDERFYGEYNYIRGALDQVIPLYNKVRNYLTRKPYSTRKVKLNFGNSQLLSGWDRNKEKDNSCVILRKGQNFYLAIMNNRHKRSFENKMLPEYKEGEPYFEKMDYKFLPDPNKMLPKVFLSKKGIEIYKPSPKLLEQYGHGTHKKGDTFSMDDLHELIDFFKHSIEAHEDWKQFGFKFSDTATYENVSSFYREVEDQGYKLSFRKVSESYVYSLIDQGKLYLFQIYNKDFSPCSKGTPNLHTLYWRMLFDERNLADVIYKLDGKAEIFFREKSLKNDHPTHPAGKPIKKKSRQKKGEESLFEYDLVKDRRYTMDKFQFHVPITMNFKCSAGSKVNDMVNAHIREAKDMHVIGIDRGERNLLYICVIDSRGTILDQISLNTINDIDYHDLLESRDKDRQQEHRNWQTIEGIKELKQGYLSQAVHRIAELMVAYKAVVALEDLNMGFKRGRQKVESSVYQQFEKQLIDKLNYLVDKKKRPEDIGGLLRAYQFTAPFKSFKEMGKQNGFLFYIPAWNTSNIDPTTGFVNLFHVQYENVDKAKSFFQKFDSISYNPKKDWFEFAFDYKNFTKKAEGSRSMWILCTHGSRIKNFRNSQKNGQWDSEEFALTEAFKSLFVRYEIDYTADLKTAIVDEKQKDFFVDLLKLFKLTVQMRNSWKEKDLDYLISPVAGADGRFFDTREGNKSLPKDADANGAYNIALKGLWALRQIRQTSEGGKLKLAISNKEWLQFVQERSYEKD

SEQ ID NO: 54 - protein, 1324 aa, Prevotella disiens
MENYQEFTNLFQLNKTLRFELKPIGKTCELLEEGKIFASGSFLEKDKVRADNVSYVKKEIDKKHKIFIEETLSSFSISNDLLKQYFDCYNELKAFKKDCKSDEEEVKKTALRNKCTSIQRAMREAISQAFLKSPQKKLLAIKNLIENVFKADENVQHFSEFTSYFSGFETNRENFYSDEEKSTSIAYRLVHDNLPIFIKNIYIFEKLKEQFDAKTLSEIFENYKLYVAGSSLDEVFSLEYFNNTLTQKGIDNYNAVIGKIVKEDKQEIQGLNEHINLYNQKHKDRRLPFFISLKKQILSDREALSWLPDMFKNDSEVIDALKGFYIEDGFENNVLTPLATLLSSLDKYNLNGIFIRNNEALSSLSQNVYRNFSIDEAIDAQNAELQTFNNYELIANALRAKIKKETKQGRKSFEKYEEYIDKKVKAIDSLSIQEINELVENYVSEFNSNSGNMPRKVEDYFSLMRKGDFGSNDLIENIKTKLSAAEKLLGTKYQETAKDIFKKDENSKLIKELLDATKQFQHFIKPLLGTGEEADRDLVFYGDFLPLYEKFEELTLLYNKVRNRLTQKPYSKDKIRLCFNKPKLMTGWVDSKTEKSDNGTQYGGYLFRKKNEIGEYDYFLGISSKAQLFRKNEAVIGDYERLDYYQPKANTIYGSAYEGENSYKEDKKRLNKVIIAYIEQIKQTNIKKSIIESISKYPNISDDDKVTPSSLLEKIKKVSIDSYNGILSFKSFQSVNKEVIDNLLKTISPLKNKAEFLDLINKDYQIFTEVQAVIDEICKQKTFIYFPISNVELEKEMGDKDKPLCLFQISNKDLSFAKTFSANLRKKRGAENLHTMLFKALMEGNQDNLDLGSGAIFYRAKSLDGNKPTHPANEAIKCRNVANKDKVSLFTYDIYKNRRYMENKFLFHLSIVQNYKAANDSAQLNSSATEYIRKADDLHIIGIDRGERNLLYYSVIDMKGNIVEQDSLNIIRNNDLETDYHDLLDKREKERKANRQNWEAVEGIKDLKKGYLSQAVHQIAQLMLKYNAIIALEDLGQMFVTRGQKIEKAVYQQFEKSLVDKLSYLVDKKRPYNELGGILKAYQLASSITKNNSDKQNGFLFYVPAWNTSKIDPVTGFTDLLRPKAMTIKEAQDFFGAFDNISYNDKGYFEFETNYDKFKIRMKSAQTRWTICTFGNRIKRKKDKNYWNYEEVELTEEFKKLFKDSNIDYENCNLKEEIQNKDNRKFFDDLIKLLQLTLQMRNSDDKGNDYIISPVANAEGQFFDSRNGDKKLPLDADANGAYNIARKGLWNIRQIKQTKNKDDLNLSISSTEWLDFVREKPYLK

SEQ ID NO: 55 - protein, 1484 aa, Unidentified
MSNFFKNFTNLYELSKTLRFELKPVGDTLTNMKDHLEYDEKLQTFLKDQNIDDAYQALKPQFDEIHEEFITDSLESKKAKEIDFSEYLDLFQEKKELNDSEKKLRNKIGETFNKAGEKWKKEKYPQYEWKKGSKIANGADILSCQDMLQFIKYKNPEDEKIKNYIDDTLKGFFTYFGGFNQNRANYYETKKEASTAVATRIVHENLPKFCDNVIQFKHIIKRKKDGTVEKTERKTEYLNAYQYLKNNNKITQIKDAETEKMIESTPIAEKIFDVYYFSSCLSQKQIEEYNRIIGHYNLLINLYNQAKRSEGKHLSANEKKYKDLPKFKTLYKQIGCGKKKDLFYTIKCDTEEEANKSRNEGKESHSVEEIINKAQEAINKYFKSNNDCENINTVPDFINYILTKENYEGVYWSKAAMNTISDKYFANYHDLQDRLKEAKVFQKADKKSEDDIKIPEAIELSGLFGVLDSLADWQTTLFKSSILSNEKLKIITDSQTPSEALLKMIFNDIEKNMESFLKETNDIITLKKYKGNKEGTEKIKQWFDYTLAINRMLKYFLVKENKIKGNSLDTNISEALKTLIYSDDAEWFKWYDALRNYLTQKPQDEAKENKLKLNFDNPSLAGGWDVNKECSNFCVILKDKNEKKYLAMIKKGENTLFQKEWTEGRGKNLTKKSNPLFEINNCEILSKMEYDFWADVSKMIPKCSTQLKAVVNHFKQSDNEFIFPIGYKVTSGEKFREECKISKQDFELNNKVFNKNELSVTAMRYDLSSTQEKQYIKAFQKEYWELLFKQEKRDTKLTNNEIFNEWINFCNKKYSELLSWERKYKDALTNWINFCKYFLSKYPKTTLFNYSFKESENYNSLDEFYRDVDICSYKLNINTTINKSILDRLVEEGKLYLFEIKNQDSNDGKSIGHKNNLHTIYWNAIFENFDNRPKLNGEAEIFYRKAISKDKLGIVKGKKTKNGTWIIKNYRFSKEKFILHVPITLNFCSNNEYVNDIVNTKFYNFSNLHFLGIDRGEKHLAYYSLVNKNGEIVDQGTLNLPFTDKDGNQRSIKKEKYFYNKQEDKWEAKEVDXWNYNDLLDAMASNRDMARKNWQRIGTIKEAKNGYVSLVIRKIADLAVNNERPAFIVLEDLNTGFKRSRQKIDKSVYQKFELALAKKLNFLVDKNAKRDEIGSPTKALQLTPPVNNYGDIENKKQAGIMLYTRANYTSQTDPATGWRKTIYLKAGPEETTYKKDGKIKNKSVKDQIIETFTDIGFDGKDYYFEYDKGEFVDEKTGEIKPKKWRLYSGENGKSLDRFRGEREKDKYEWKIDKIDIVKILDDLFVNFDKNISLLKQLKEGVELTRNNEHGTGESLRFAINLIQQIRNTGNNERDNDFILSPVRDENGKHFDSREYWDKETKGEKISMPSSGDANGAFNIARKGIIMNAHILANSDSKDLSLFVSDEEWDLHLNNKTEWKKQLNIFSSRKAMAKRKKKRPAATKK

SEQ ID NO: 56 - protein, 1245 aa, Porphyromonas macacae
MKTQHFFEDFTSLYSLSKTIRFELKPIGKTLENIKKNGLIRRDEQRLDDYEKLKKVIDEYHEDFIANILSSFSFSEEILQSYIQNLSISEARAKIEKTMRDTLAKAFSEDERYKSIFKKELVKKDIPVWCPAYKSLCKKFDNFTTSLVPFHENRKNLYTSNEITASIPYRIVHVNLPKFIQNIEALCELQKKMGADLYLEMMENLRNVWPSFVKTPDDLCNLKTYNHLMVQSSISEYNRFVGGYSTEDGTKHQGINEWINIYRQRNKEMRLPGLVFLHKQILAKVDSSSFISDTLENDDQVFCVLRQFRKLFWNTVSSKEDDAASLKDLFCGLSGYDPEAIYVSDAHLATISKNIFDRWNYISDAIRRKTEVLMPRKKESVERYAEKISKQIKKRQSYSLAELDDLLAHYSEESLPAGFSLLSYFTSLGGQKYLVSDGEVILYEEGSNIWDEVLIAFRDLQVILDKDFTEKKLGKDEEAVSVIKKALDSALRLRKFFDLLSGTGAEIRRDSSFYALYTDRMDKLKGLLKMYDKVRNYLTKKPYSIEKFKLHFDNPSLLSGWDKNKELNNLSVIFRQNGYYYLGIMTPKGKNLFKTLPKLGAEEMFYEKMEYKQIAEPMLMLPKVFFPKKTKPAFAPDQSVVDIYNKKTFKTGQKGFNKKDLYRLIDFYKEALTVHEWKLFNFSFSPTEQYRNIGEFFDEVREQAYKVSMVNVPASYIDEAVENGKLYLFQIYNKDFSPYSKGIPNLHTLYWKALFSEQNQSRVYKLCGGGELFYRKASLHMQDTTVHPKGISIHKKNLNKKGETSLFNYDLVKDKRFTEDKFFFHVPISINYKNKKITNVNQMVRDYIAQNDDLQHGIDRGERNLLYISRIDTRGNLLEQFSLNVIESDKGDLRTDYQKILGDREQERLRRRQEWKSIESIKDLKDGYMSQVVHKICNMVVEHKAIVVLENLNLSFMKGRKKVEKSVYEKFERMLVDKLNYLVVDKKNLSNEPGGLYAAYQLTNPLFSFEELHRYPQSGILFFVDPWNTSLTDPSTGFVNLLGRINYTNVGDARKFFDRFNAIRYDGKGNILFDLDLSRFDVRVETQRKLWTLTTFGSRIAKSKKSGKWMVERIENLSLCFLELFEQFNIGYRVEKDLKKAILSQDRKEFYVRLIYLFNLMMQIRNSDGEEDYILSPALNEKNLQFDSRLIEAKDLPVDADANGAYNVARKGLMVVQRIKRGDHESIHRIGRAQWLRYVQEGIVE

SEQ ID NO: 57 - protein, 1250 aa, Smithella sp.
MQTLFENFTNQYPVSKTLRFELIPQGKTKDFIEQKGLLKKDEDRAEKYKKVKNIIDEYHKDFIEKSLNGLKLDGLEKYKTLYLKQEKDDKDKKAFDKEKENLRKQIANAFRNNEKFKTLFAKELIKNDLMSFACEEDKKNVKEFEAFTTYFTGFHQNRANMYVADEKRTAIASRLIHENLPKFIDNIKIFEKMKKEAPELLSPFNQTLKDMKDVIKGTTLEEIFSLDYFNKTLTQSGIDIYNSVIGGRTPEEGKTKIKGLNEYINTDFNQKQTDKKKRQPKFKQLYKQILSDRQSLSFIAEAFKNDTEILEAIEKFYVNELLHFSNEGKSTNVLDAIKNAVSNLESFNLTKMYFRSGASLTDVSRKVFGEWSIINRALDNYYATTYPIKPREKSEKYEERKEKWLKQDFNVSLIQTAIDEYDNETVKGKNSGKVIADYFAKFCDDKETDLIQKVNEGYIAVKDLLNTPCPENEKLGSNKDQVKQIKAFMDSIMDIMHFVRPLSLKDTDKEKDETFYSLFTPLYDHLTQTIALYNKVRNYLTQKPYSTEKIKLNFENSTLLGGWDLNKETDNTAIILRKDNLYYLGIMDKRHNRIFRNVPKADKKDFCYEKMVYKLLPGANKMLPKVFFSQSRIQEFTPSAKLLENYANETHKKGDNFNLNHCHKLIDFFKDSINKHEDWKNFDFRFSATSTYADLSGFYHEVEHQGYKISFQSVADSFIDDLVNEGKLYLFQIYNKDFSPFSKGKPNLHTLYWKMLFDENNLKDVVYKLNGEAEVFYRKKSIAEKNTTIHKANESIINKNPDNPKATSTFNYDIVKDKRYTIDKFQFHIPITMNFKAEGIFNMNQRVNQFLKANPDINIIGIDRGERHLLYYALINQKGKILKQDTLNVIANEKQKVDYHNLLDKKEGDRATARQEWGVIETIKELKEGYLSQVIHKLTDLMIENNAIIVMEDLNFGFKRGRQKVEKQVYQKFEKMLIDKLNYLVDKNKKANELGGLLNAFQLANKFESFQKMGKQNGFIFYVPAWNTSKTDPATGFIDFLKPRYENLNQAKDFFEKFDSIRLNSKADYFEFAFDFKNFTEKADGGRTKWTVCTTNEDRYQWNRALNNNRGSQEKYDITAELKSLFDGKVDYKSGKDLKQQIASQESADFFKALMKNLSITLSLRHNNGEKGDNEQDYILSPVADSKGRFFDSRKADDDMPKNADANGAYHIALKGLWCLEQISKTDDLKKVKLAISNKEWLEFVQTLKG

SEQ ID NO: 58 - protein, 1228 aa, Unidentified
MSKLEKFTNCYSLSKTLRFKAIPVGKTQENIDNKRLLVEDEKRAEDYKGVKKLLDRYYLSFINDVLHSIKLKNLNNYISLFRKKTRTEKENKELENLEINLRKEIAKAFKGNEGYKSLFKKDIIETILPEFLDDKDEIALVNSFNGFTTAFTGFFDNRENMFSEEAKSTSIAFRCINENLTRYISNMDIFEKVDAIFDKHEVQEIKEKILNSDYDVEDFFEGEFFNFVLTQEGIDVYNAIIGGFVTESGEKIKGLNEYINLYNQKTKQKLPKFKPLYKQVLSDRESLSFYGEGYTSDEEVLEVFRNTLNKNSEIFSSIKKLEKLFKNFDEYSSAGIFVKNGPAISTISKDIFGEWNVIRDKWNAEYDDIHLKKKAVVTEKYEDDRRKSFKKIGSFSLEQLQEYADADLSVVEKLKEIIIQKVDEIYKVYGSSEKLFDADFVLEKSLKKNDAVVAIMKDLLDSVKSFENYIKAFFGEGKETNRDESFYGDFVLAYDILLKVDHIYDAIRNYVTQKPYSKDKFKLYFQNPQFMGGWDKDKETDYRATILRYGSKYYLAIMDKKYAKCLQKIDKDDVNGNYEKINYKLLPGPNKMLPKVFFSKKWMAYYNPSEDIQKIYKNGTFKKGDMFNLNDCHKLIDFFKDSISRYPKWSNAYDFNFSETEKYKDIAGFYREVEEQGYKVSFESASKKEVDKLVEEGKLYMFQIYNKDFSDKSHGTPNLHTMYFKLLFDENNHGQIRLSGGAELFMRRASLKKEELVVHPANSPIANKNPDNPKKTTTLSYDVYKDKRFSEDQYELHIPIAINKCPKNIFKINTEVRVLLKHDDNPYVIGIDRGERNLLYIVVVDGKGNIVEQYSLNEIINNFNGIRIKTDYHSLLDKKEKERFEARQNWTSIENIKELKAGYISQVVHKICELVEKYDAVIALEDLNSGFKNSRVKVEKQVYQKFEKMLIDKLNYMVDKKSNPCATGGALKGYQITNKFESFKSMSTQNGFIFYIPAWLTSKIDPSTGFVNLLKTKYTSIADSKKFISSFDRIMYVPEEDLFEFALDYKNFSRTDADYIKKWKLYSYGNRIRIFRNPKKNNVFDWEEVCLTSAYKELFNKYGINYQQGDIRALLCEQSDKAFYSSFMALMSLMLQMRNSITGRTDVDFLISPVKNSDGIFYDSRNYEAQENAILPKNADANGAYNIARKVLWAIGQFKKAEDEKLDKVKIAISNKEWLEYAQTSVKH

SEQ ID NO: 59 - protein, 1227 aa, Unidentified
SKLEKFTNCYSLSKTLRFKAIPVGKTQENIDNKRLLVEDEKRAEDYKGVKKLLDRYYLSFINDVLHSIKLKNLNNYISLFRKKTRTEKENKELENLEINLRKEIAKAFKGNEGYKSLFKKDIIETILPEFLDDKDEIALVNSFNGFTTAFTGFFDNRENMFSEEAKSTSIAFRCINENLTRYISNMDIFEKVDAIFDKHEVQEIKEKILNSDYDVEDFFEGEFFNFVLTQEGIDVYNAIIGGFVTESGEKIKGLNEYINLYNQKTKQKLPKFKPLYKQVLSDRESLSFYGEGYTSDEEVLEVFRNTLNKNSEIFSSIKKLEKLFKNFDEYSSAGIFVKNGPAISTISKDIFGEWNVIRDKWNAEYDDIHLKKKAVVTEKYEDDRRKSFKKIGSFSLEQLQEYADADLSVVEKLKEIIIQKVDEIYKVYGSSEKLFDADFVLEKSLKKNDAVVAIMKDLLDSVKSFENYIKAFFGEGKETNRDESFYGDFVLAYDILLKVDHIYDAIRNYVTQKPYSKDKFKLYFQNPQFMGGWDKDKETDYRATILRYGSKYYLAIMDKKYAKCLQKIDKDDVNGNYEKINYKLLPGPNKMLPKVFFSKKWMAYYNPSEDIQKIYKNGTFKKGDMFNLNDCHKLIDFFKDSISRYPKWSNAYDFNFSETEKYKDIAGFYREVEEQGYKVSFESASKKEVDKLVEEGKLYMFQIYNKDFSDKSHGTPNLHTMYFKLLFDENNHGQIRLSGGAELFMRRASLKKEELVVHPANSPIANKNPDNPKKTTTLSYDVYKDKRFSEDQYELHIPIAINKCPKNIFKINTEVRVLLKHDDNPYVIGIDRGERNLLYIVVVDGKGNIVEQYSLNEIINNFNGIRIKTDYHSLLDKKEKERFEARQNWTSIENIKELKAGYISQVVHKICELVEKYDAVIALEDLNSGFKNSRVKVEKQVYQKFEKMLIDKLNYMVDKKSNPCATGGALKGYQITNKFESFKSMSTQNGFIFYIPAWLTSKIDPSTGFVNLLKTKYTSIADSKKFISSFDRIMYVPEEDLFEFALDYKNFSRTDADYIKKWKLYSYGNRIRIFRNPKKNNVFDWEEVCLTSAYKELFNKYGINYQQGDIRALLCEQSDKAFYSSFMALMSLMLQMRNSITGRTDVDFLISPVKNSDGIFYDSRNYEAQENAILPKNADANGAYNIARKVLWAIGQFKKAEDEKLDKVKIAISNKEWLEYAQTSVKH

SEQ ID NO: 60 - protein, 1228 aa, Synthetic construct
MSKLEKFTNCYSLSKTLRFKAIPVGKTQENIDNKRLLVEDEKRAEDYKGVKKLLDRYYLSFINDVLHSIKLKNLNNYISLFRKKTRTEKENKELENLEINLRKEIAKAFKGNEGYKSLFKKDIIETILPEFLDDKDEIALVNSFNGFTTAFTGFFDNRENMFSEEAKSTSIAFRCINENLTRYISNMDIFEKVDAIFDKHEVQEIKEKILNSDYDVEDFFEGEFFNFVLTQEGIDVYNAIIGGFVTESGEKIKGLNEYINLYNQKTKQKLPKFKPLYKQVLSDRESLSFYGEGYTSDEEVLEVFRNTLNKNSEIFSSIKKLEKLFKNFDEYSSAGIFVKNGPAISTISKDIFGEWNVIRDKWNAEYDDIHLKKKAVVTEKYEDDRRKSFKKIGSFSLEQLQEYADADLSVVEKLKEIIIQKVDEIYKVYGSSEKLFDADFVLEKSLKKNDAVVAIMKDLLDSVKSFENYIKAFFGEGKETNRDESFYGDFVLAYDILLKVDHIYDAIRNYVTQKPYSKDKFKLYFQNPQFMGGWDKDKETDYRATILRYGSKYYLAIMDKKYAKCLQKIDKDDVNGNYEKINYKLLPGPNKMLPKVFFSKKWMAYYNPSEDIQKIYKNGTFKKGDMFNLNDCHKLIDFFKDSISRYPKWSNAYDFNFSETEKYKDIAGFYREVEEQGYKVSFESASKKEVDKLVEEGKLYMFQIYNKDFSDKSHGTPNLHTMYFKLLFDENNHGQIRLSGGAELFMRRASLKKEELVVAPANSPIANKNPDNPKKTTTLSYDVYKDKRFSEDQYELHIPIAINKCPKNIFKINTEVRVLLKHDDNPYVIGIDRGERNLLYIVVVDGKGNIVEQYSLNEIINNFNGIRIKTDYHSLLDKKEKERFEARQNWTSIENIKELKAGYISQVVHKICELVEKYDAVIALEDLNSGFKNSRVKVEKQVYQKFEKMLIDKLNYMVDKKSNPCATGGALKGYQITNKFESFKSMSTQNGFIFYIPAWLTSKIDPSTGFVNLLKTKYTSIADSKKFISSFDRIMYVPEEDLFEFALDYKNFSRTDADYIKKWKLYSYGNRIRIFRNPKKNNVFDWEEVCLTSAYKELFNKYGINYQQGDIRALLCEQSDKAFYSSFMALMSLMLQMRNSITGRTDVDFLISPVKNSDGIFYDSRNYEAQENAILPKNADANGAYNIARKVLWAIGQFKKAEDEKLDKVKIAISNKEWLEYAQTSVKH

SEQ ID NO: 61 - protein, 1307 aa, Synthetic construct
MTQFEGFTNLYQVSKTLRFELIPQGKTLKHIQEQGFIEEDKARNDHYKELKPIIDRIYKTYADQCLQLVQLDWENLSAAIDSYRKEKTEETRNALIEEQATYRNAIHDYFIGRTDNLTDAINKRHAEIYKGLFKAELFNGKVLKQLGTVTTTEHENALLRSFDKFTTYFSGFYRNRKNVFSAEDISTAIPHRIVQDNFPKFKENCHIFTRLITAVPSLREHFENVKKAIGIFVSTSIEEVFSFPFYNQLLTQTQIDLYNQLLGGISREAGTEKIKGLNEVLNLAIQKNDETAHIIASLPHRFIPLFKQILSDRNTLSFILEEFKSDEEVIQSFCKYKTLLRNENVLETAEALFNELNSIDLTHIFISHKKLETISSALCDHWDTLRNALYERRISELTGKITKSAKEKVQRSLKHEDINLQEIISAAGKELSEAFKQKTSEILSHAHAALDQPLPTTLKKQEEKEILKSQLDSLLGLYHLLDWFAVDESNEVDPEFSARLTGIKLEMEPSLSFYNKARNYATKKPYSVEKFKLNFQMPTLARGWDVNREKNNGAILFVKNGLYYLGIMPKQKGRYKALSFEPTEKTSEGFDKMYYDYFPDAAKMIPKCSTQLKAVTAHFQTHTTPILLSNNFIEPLEITKEIYDLNNPEKEPKKFQTAYAKKTGDQKGYREALCKWIDFTRDFLSKYTKTTSIDLSSLRPSSQYKDLGEYYAELNPLLYHISFQRIAEKEIMDAVETGKLYLFQIYNKDFAKGHHGKPNLHTLYWTGLFSPENLAKTSIKLNGQAELFYRPKSRMKRMAARLGEKMLNKKLKDQKTPIPDTLYQELYDYVNHRLSHDLSDEARALLPNVITKEVSHEIIKDRRFTSDKFFFHVPITLNYQAANSPSKFNQRVNAYLKEHPETPIIGIDRGERNLIYITVIDSTGKILEQRSLNTIQQFDYQKKLDNREKERVAARQAWSVVGTIKDLKQGYLSQVIHEIVDLMIHYQAVVVLENLNFGFKSKRTGIAEKAVYQQFEKMLIDKLNCLVLKDYPAEKVGGVLNPYQLTDQFTSFAKMGTQSGFLFYVPAPYTSKIDPLTGFVDPFVWKTIKNHESRKHFLEGFDFLHYDVKTGDFILHFKMNRNLSFQRGLPGFMPAWDIVFEKNETQFDAKGTPFIAGKRIVPVIENHRFTGRYRDLYPANELIALLEEKGIVFRDGSNILPKLLENDDSHAIDTMVALIRSVLQMRNSNAATGEDYINSPVRDLNGVCFDSRFQNPEWPMDADANGAYHIALKGQLLLNHLKESKDLKLQNGISNQDWLAYIQELRN

SEQ ID NO: 62 - protein, 1307 aa, Synthetic construct
MTQFEGFTNLYQVSKTLRFELIPQGKTLKHIQEQGFIEEDKARNDHYKELKPIIDRIYKTYADQCLQLVQLDWENLSAAIDSYRKEKTEETRNALIEEQATYRNAIHDYFIGRTDNLTDAINKRHAEIYKGLFKAELFNGKVLKQLGTVTTTEHENALLRSFDKFTTYFSGFYRNRKNVFSAEDISTAIPHRIVQDNFPKFKENCHIFTRLITAVPSLREHFENVKKAIGIFVSTSIEEVFSFPFYNQLLTQTQIDLYNQLLGGISREAGTEKIKGLNEVLNLAIQKNDETAHIIASLPHRFIPLFKQILSDRNTLSFILEEFKSDEEVIQSFCKYKTLLRNENVLETAEALFNELNSIDLTHIFISHKKLETISSALCDHWDTLRNALYERRISELTGKITKSAKEKVQRSLKHEDINLQEIISAAGKELSEAFKQKTSEILSHAHAALDQPLPTTLKKQEEKEILKSQLDSLLGLYHLLDWFAVDESNEVDPEFSARLTGIKLEMEPSLSFYNKARNYATKKPYSVEKFKLNFQMPTLARGWDVNREKNNGAILFVKNGLYYLGIMPKQKGRYKALSFEPTEKTSEGFDKMYYDYFPDAAKMIPKCSTQLKAVTAHFQTHTTPILLSNNFIEPLEITKEIYDLNNPEKEPKKFQTAYAKKTGDQKGYREALCKWIDFTRDFLSKYTKTTSIDLSSLRPSSQYKDLGEYYAELNPLLYHISFQRIAEKEIMDAVETGKLYLFQIYNKDFAKGHHGKPNLHTLYWTGLFSPENLAKTSIKLNGQAELFYRPKSRMKRMAHRLGEKMLNKKLKDQKTPIPDTLYQELYDYVNHRLSHDLSDEARALLPNVITKEVSHEIIKDRRFTSDKFFFHVPITLNYQAANSPSKFNQRVNAYLKEHPETPIIGIDRGERNLIYITVIDSTGKILEQRSLNTIQQFDYQKKLDNREKERVAARQAWSVVGTIKDLKQGYLSQVIHEIVDLMIHYQAVVVLENLNFGFKSKRTGIAEKAVYQQFEKMLIDKLNCLVLKDYPAEKVGGVLNPYQLTDQFTSFAKMGTQSGFLFYVPAPYTSKIDPLTGFVDPFVWKTIKNHESRKHFLEGFDFLHYDVKTGDFILHFKMNRNLSFQRGLPGFMPAWDIVFEKNETQFDAKGTPFIAGKRIVPVIENHRFTGRYRDLYPANELIALLEEKGIVFRDGSNILPKLLENDDSHAIDTMVALIRSVLQMRNSNAATGEDYINSPVRDLNGVCFDSRFQNPEWPMDADANGAYHIALKGQLLLNHLKESKDLKLQNGISNQDWLAYIQELRN

SEQ ID NO: 63 - protein, 1107 aa, Bacillus hisashii
ATRSFILKIEPNEEVKKGLWKTHEVLNHGIAYYMNILKLIRQEAIYEHHEQDPKNPKKVSKAEIQAELWDFVLKMQKCNSFTHEVDKDEVFNILRELYEELVPSSVEKKGEANQLSNKFLYPLVDPNSQSGKGTASSGRKPRWYNLKIAGDPSWEEEKKKWEEDKKKDPLAKILGKLAEYGLIPLFIPYTDSNEPIVKEIKWMEKSRNQSVRRLDKDMFIQALERFLSWESWNLKVKEEYEKVEKEYKTLEERIKEDIQALKALEQYEKERQEQLLRDTLNTNEYRLSKRGLRGWREIIQKWLKMDENEPSEKYLEVFKDYQRKHPREAGDYSVYEFLSKKENHFIWRNHPEYPYLYATFCEIDKKKKDAKQQATFTLADPINHPLWVRFEERSGSNLNKYRILTEQLHTEKLKKKLTVQLDRLIYPTESGGWEEKGKVDIVLLPSRQFYNQIFLDIEEKGKHAFTYKDESIKFPLKGTLGGARVQFDRDHLRRYPHKVESGNVGRIYFNMTVNIEPTESPVSKSLKIHRDDFPKVVNFKPKELTEWIKDSKGKKLKSGIESLEIGLRVMSIDLGQRQAAAASIFEVVDQKPDIEGKLFFPIKGTELYAVHRASFNIKLPGETLVKSREVLRKAREDNLKLMNQKLNFLRNVLHFQQFEDITEREKRVTKWISRQENSDVPLVYQDELIQIRELMYKPYKDWVAFLKQLHKRLEVEIGKEVKHWRKSLSDGRKGLYGISLKNIDEIDRTRKFLLRWSLRPTEPGEVRRLEPGQRFAIDQLNHLNALKEDRLKKMANTIIMHALGYCYDVRKKKWQAKNPACQIILFEDLSNYNPYGERSRFENSRLMKWSRREIPRQVALQGEIYGLQVGEVGAQFSSRFHAKTGSPGIRCRVVTKEKLQDNRFFKNLQREGRLTLDKIAVLKEGDLYPDKGGEKFISLSKDRKCVTTHADINAAQNLQKRFWTRTHGFYKVYCKAYQVDGQTVYIPESKDQKQKIIEEFGEGYFILKDGVYEWVNAGKLKIKKGSSKQSSSELVDSDILKDSFDLASELKGEKLMLYRDPSGNVFPSDKWMAAGVFFGKLERILISKLTNQYSISTIEDDSSKQSM

SEQ ID NO: 64 - protein, 1228 aa, Synthetic construct
MSKLEKFTNCYSLSKTLRFKAIPVGKTQENIDNKRLLVEDEKRAEDYKGVKKLLDRYYLSFINDVLHSIKLKNLNNYISLFRKKTRTEKENKELENLEINLRKEIAKAFKGNEGYKSLFKKDIIETILPEFLDDKDEIALVNSFNGFTTAFTGFFDNRENMFSEEAKSTSIAFRCINENLTRYISNMDIFEKVDAIFDKHEVQEIKEKILNSDYDVEDFFEGEFFNFVLTQEGIDVYNAIIGGFVTESGEKIKGLNEYINLYNQKTKQKLPKFKPLYKQVLSDRESLSFYGEGYTSDEEVLEVFRNTLNKNSEIFSSIKKLEKLFKNFDEYSSAGIFVKNGPAISTISKDIFGEWNVIRDKWNAEYDDIHLKKKAVVTEKYEDDRRKSFKKIGSFSLEQLQEYADADLSVVEKLKEIIIQKVDEIYKVYGSSEKLFDADFVLEKSLKKNDAVVAIMKDLLDSVKSFENYIKAFFGEGKETNRDESFYGDFVLAYDILLKVDHIYDAIRNYVTQKPYSKDKFKLYFQNPQFMRGWDKDKETDYRATILRYGSKYYLAIMDKKYAKCLQKIDKDDVNGNYEKINYKLLPGPNKMLPRVFFSKKWMAYYNPSEDIQKIYKNGTFKKGDMFNLNDCHKLIDFFKDSISRYPKWSNAYDFNFSETEKYKDIAGFYREVEEQGYKVSFESASKKEVDKLVEEGKLYMFQIYNKDFSDKSHGTPNLHTMYFKLLFDENNHGQIRLSGGAELFMRRASLKKEELVVHPANSPIANKNPDNPKKTTTLSYDVYKDKRFSEDQYELHIPIAINKCPKNIFKINTEVRVLLKHDDNPYVIGIARGERNLLYIVVVDGKGNIVEQYSLNEIINNFNGIRIKTDYHSLLDKKEKERFEARQNWTSIENIKELKAGYISQVVHKICELVEKYDAVIALEDLNSGFKNSRVKVEKQVYQKFEKMLIDKLNYMVDKKSNPCATGGALKGYQITNKFESFKSMSTQNGFIFYIPAWLTSKIDPSTGFVNLLKTKYTSIADSKKFISSFDRIMYVPEEDLFEFALDYKNFSRTDADYIKKWKLYSYGNRIRIFRNPKKNNVFDWEEVCLTSAYKELFNKYGINYQQGDIRALLCEQSDKAFYSSFMALMSLMLQMRNSITGRTDVDFLISPVKNSDGIFYDSRNYEAQENAILPKNADANGAYNIARKVLWAIGQFKKAEDEKLDKVKIAISNKEWLEYAQTSVKH

SEQ ID NO: 65 - protein, 1227 aa, Synthetic construct
SKLEKFTNCYSLSKTLRFKAIPVGKTQENIDNKRLLVEDEKRAEDYKGVKKLLDRYYLSFINDVLHSIKLKNLNNYISLFRKKTRTEKENKELENLEINLRKEIAKAFKGNEGYKSLFKKDIIETILPEFLDDKDEIALVNSFNGFTTAFTGFFDNRENMFSEEAKSTSIAFRCINENLTRYISNMDIFEKVDAIFDKHEVQEIKEKILNSDYDVEDFFEGEFFNFVLTQEGIDVYNAIIGGFVTESGEKIKGLNEYINLYNQKTKQKLPKFKPLYKQVLSDRESLSFYGEGYTSDEEVLEVFRNTLNKNSEIFSSIKKLEKLFKNFDEYSSAGIFVKNGPAISTISKDIFGEWNVIRDKWNAEYDDIHLKKKAVVTEKYEDDRRKSFKKIGSFSLEQLQEYADADLSVVEKLKEIIIQKVDEIYKVYGSSEKLFDADFVLEKSLKKNDAVVAIMKDLLDSVKSFENYIKAFFGEGKETNRDESFYGDFVLAYDILLKVDHIYDAIRNYVTQKPYSKDKFKLYFQNPQFMRGWDKDKETDYRATILRYGSKYYLAIMDKKYAKCLQKIDKDDVNGNYEKINYKLLPGPNKMLPRVFFSKKWMAYYNPSEDIQKIYKNGTFKKGDMFNLNDCHKLIDFFKDSISRYPKWSNAYDFNFSETEKYKDIAGFYREVEEQGYKVSFESASKKEVDKLVEEGKLYMFQIYNKDFSDKSHGTPNLHTMYFKLLFDENNHGQIRLSGGAELFMRRASLKKEELVVHPANSPIANKNPDNPKKTTTLSYDVYKDKRFSEDQYELHIPIAINKCPKNIFKINTEVRVLLKHDDNPYVIGIARGERNLLYIVVVDGKGNIVEQYSLNEIINNFNGIRIKTDYHSLLDKKEKERFEARQNWTSIENIKELKAGYISQVVHKICELVEKYDAVIALEDLNSGFKNSRVKVEKQVYQKFEKMLIDKLNYMVDKKSNPCATGGALKGYQITNKFESFKSMSTQNGFIFYIPAWLTSKIDPSTGFVNLLKTKYTSIADSKKFISSFDRIMYVPEEDLFEFALDYKNFSRTDADYIKKWKLYSYGNRIRIFRNPKKNNVFDWEEVCLTSAYKELFNKYGINYQQGDIRALLCEQSDKAFYSSFMALMSLMLQMRNSITGRTDVDFLISPVKNSDGIFYDSRNYEAQENAILPKNADANGAYNIARKVLWAIGQFKKAEDEKLDKVKIAISNKEWLEYAQTSVKH

SEQ ID NO: 66 - DNA, 3987 bp, Synthetic construct
  source 1..3987: mol_type = other DNA
atggccgggagcaagaagcgccggataaagcaggacacgcagttcgagggcttcaccaacctgtaccaagtctccaagacgctccggttcgagcttatcccgcaagggaagaccctgaaacacatccaggaacaaggtttcatcgaggaggacaaggcccgcaacgaccactacaaggagctcaagcccataatcgatcggatctacaagacgtacgccgaccagtgcctccaactggtgcagctcgactgggagaacctgagcgccgccattgacagctaccgcaaggaaaagacggaggagacgcgcaacgcccttattgaggagcaagccacctaccgcaacgccatccacgactacttcatcgggcgcaccgacaacctgacggacgcgatcaacaagcgccacgcggaaatctacaagggccttttcaaggccgagctcttcaacgggaaggtcctaaaacagctcgggactgtcacgacaaccgagcatgagaacgccctccttcgcagcttcgacaagttcaccacatacttctcgggcttctaccggaaccgcaagaacgttttcagcgccgaggacatctccaccgccatcccgcacaggatcgtccaggacaacttccccaagttcaaggagaactgccacatcttcacgcgcctgattacagccgtaccttcacttcgtgagcacttcgagaacgtcaaaaaggccatcgggatcttcgtctccacgtccatcgaggaggtattctctttcccgttctataaccagctcctgacccagacgcagatcgacctctacaaccagctactgggcggcatcagccgggaggccgggaccgagaaaataaagggcctcaacgaagttctcaacctggccatccagaagaacgacgagaccgcgcatatcatcgcatccctgccgcatcgcttcattcctttgttcaagcagatattgagcgaccggaacaccctctcgttcatcctcgaagaattcaagagcgacgaggaggtcattcagtctttctgcaagtacaagacgctcctacggaatgagaatgtgctggagaccgcggaggcactcttcaatgagctgaactccattgacctgacccacatcttcattagccacaagaaactggagacgatctccagcgccctgtgcgaccactgggacactctccgcaacgccctctacgaacgccggatctccgaacttaccggcaagataactaagtcggctaaggagaaggtgcaacggagcctcaagcacgaggacatcaaccttcaggaaatcatctcagccgcgggcaaggagctgagcgaggcgtttaagcagaaaacatcggagatactgagccacgcgcacgcggccctggatcaaccgctgccgacgactctcaagaagcaagaggagaaggaaatccttaagtcccagctcgactcgctgctcggcctctatcacttgctcgactggttcgcggttgatgagtccaacgaggtggacccggagttctccgcgcgcctcacgggtattaagctggagatggagccaagcttaagcttctacaacaaggcccgcaactacgcgaccaaaaaaccgtactcagtcgagaaattcaagctgaatttccagatgcctacattggcgagggggtgggacgtgaaccgcgagaagaacaatggagccatcctgttcgtcaaaaatgggttgtactacctgggcatcatgcccaagcagaagggccgttacaaggccctgtcattcgagcctaccgagaagacctcggagggcttcgacaagatgtactacgactatttcccggacgccgccaagatgatcccgaagtgctccacgcagctcaaagccgtcacggcccacttccagacgcataccacgccgatacttctgagcaacaacttcattgagccgctagagatcacgaaggagatatacgacctaaacaaccccgaaaaggagcccaagaagttccagacagcctacgctaagaagacaggtgatcagaagggatatagggaggcactctgcaagtggatcgacttcacgcgcgacttcctgtcgaaatatacaaagacgaccagcattgacctaagttctctccgcccatcctcccagtacaaggatctgggcgagtattatgcggagctgaacccattgctgtaccacatcagcttccagaggatcgccgagaaggagattatggacgcggtggagacggggaaactatacctgttccaaatatataacaaggacttcgctaaagggcaccacgggaagcccaacctgcacacactctactggacgggcttgttttcgccagaaaatttggccaagacttcgatcaagctcaacggccaggcggagttgttttaccgtcccaagtctcgcatgaagcgcatggcgcatcgcctcggagagaaaatgcttaacaagaagctcaaggatcagaagacgcccatacctgatacgttgtaccaggaattgtacgactacgtgaaccaccgcctatcgcacgacctctcagacgaggcccgcgccctcctcccaaacgtgattactaaggaggtttcccatgaaataatcaaggaccgacggttcaccagcgacaaattttttttccacgtgcctatcacgctcaattaccaggcggccaactccccatcgaagttcaaccagcgcgtgaacgcctaccttaaggagcacccggagaccccaatcatcgggatcgaccgtggcgagcggaacctgatctatattacggtgatcgatagcaccgggaagatcctggagcagcgctccctgaacacaatccagcagtttgactaccagaagaaactcgacaaccgggagaaggagcgcgtcgcagcccggcaagcatggagtgtggtcggcaccataaaggacctgaaacagggttacctaagtcaagttatccacgagatcgttgacctgatgatacactatcaagccgtagtcgtgctggagaacctcaacttcgggtttaagtccaagcgcaccggcatcgcggagaaggcggtgtaccagcagttcgagaagatgctgatcgacaagctgaactgcctggtgctcaaggactaccctgcggagaaggtcggcggggtcttgaacccgtaccagctaaccgaccagttcacgagcttcgccaaaatgggcacgcagtccggattcttgttttatgtcccggctccatatacaagtaagatcgacccgctgacagggtttgttgacccattcgtgtggaagaccatcaagaaccacgagagcaggaaacacttcttagagggcttcgacttcctgcattacgacgttaagacaggcgacttcatcctgcacttcaagatgaaccgcaacctgtcgttccagaggggcctgcccggcttcatgcccgcctgggatatcgtctttgagaagaatgagacgcagttcgacgcgaaggggacgccgttcatcgctggaaagcggatcgtgccggtcatcgagaaccaccgcttcacgggtcgctaccgagatttataccccgccaacgaactaattgcgctgctggaggagaaggggatcgtgttccgagatggcagcaacattctcccgaagctgctggagaacgacgactcgcacgctattgacacgatggtcgccctcatacggagcgtgcttcagatgcggaacagtaacgctgccacgggcgaggactacattaactcccccgtccgcgacctcaacggggtctgcttcgatagccgcttccagaacccggagtggcctatggatgcggacgcgaacggggcctaccacatcgccctcaagggccaactcctgctcaaccacttgaaggaaagcaaagacctcaaattgcagaatggcatcagtaaccaggactggctcgcgtacatccaggaactgagaaacgggtccaagaagcggcgtatcaagcaagattga

SEQ ID NO: 67 - DNA, 3987 bp, Synthetic construct
  source 1..3987: mol_type = other DNA
atggcgggaagcaaaaagcgccggattaagcaagacacgcagttcgagggcttcacgaacctctaccaagtcagcaagaccctccggttcgagctgataccacagggaaagacgctcaagcacatccaggaacagggcttcatcgaggaggacaaggcgcgcaacgaccactacaaggagttgaaaccgatcatcgaccgcatctacaagacgtacgccgaccagtgcctccagctcgtgcagctcgactgggagaacctctccgccgccattgactcgtaccggaaggagaagactgaggagacccgcaacgccctgatcgaggagcaagcaacctaccggaacgccatccacgactacttcatcggccgcaccgacaacctcaccgacgcgatcaacaagcggcacgcggagatatacaaagggctgttcaaggcggagctgttcaacggcaaggtgctcaagcagctagggacggtgaccacgaccgagcacgagaacgcgctcctccgcagcttcgacaagttcaccacctacttcagcggcttctaccggaaccgcaagaatgtgttcagcgcggaggacatcagcacggccatcccgcaccgcatcgtccaggacaacttcccgaagttcaaggagaactgccacatcttcacccgcctgataaccgccgtcccctccctgcgggagcacttcgagaacgtcaaaaaggcaattgggatcttcgtctcgaccagcattgaggaggtgttcagcttccccttctacaaccagctcctcacccagacgcagatcgacctgtacaatcagttgctcggcgggataagccgcgaggcgggaaccgaaaaaatcaaggggctgaacgaagtgttgaacctcgccatccagaagaacgacgagaccgcgcacatcatcgcctccctgccccaccggttcatcccgctgttcaagcagatcctctctgaccggaacaccctgtccttcattcttgaggagttcaagtcggacgaggaggtcatccagagcttctgcaagtacaagacgctgctacggaacgagaacgtgctggagacggcggaggcactgttcaacgagctaaacagcatcgacctcacgcacatcttcatcagtcacaagaaactggagaccatctcctccgcgctgtgcgaccactgggacacgctcaggaacgcgctctacgagcgccgaatcagtgagctgacgggcaagatcacgaagtccgcgaaggagaaggtgcagcggtccctcaagcacgaggacatcaacctccaggagatcatctcagcggctgggaaagagctgtccgaggcgttcaagcagaaaacgagcgaaatcctgtcccacgcgcacgcggccctggatcagcctctgccgacgaccctcaagaaacaagaagaaaaggaaatcctcaagtcgcagctcgactcgctgctgggcctgtaccatctcctcgactggttcgccgtggacgagagcaacgaggtggaccccgagttctccgcgcggcttacggggatcaagctggagatggagcccagcctgtccttctacaacaaggcgcgcaactacgccaccaagaagccctacagcgtggagaagttcaagctcaacttccagatgcccactctcgcacgtgggtgggacgtcaaccgcgaaaaaaataatggggcgatcctgttcgtcaagaacggcctgtactacttgggcatcatgccgaaacagaagggccgctacaaggccctgagcttcgaaccgaccgagaaaacgagcgaggggttcgacaagatgtactacgactacttccccgacgccgcgaagatgattccaaagtgctccacgcagcttaaggccgtgacggcccacttccagacgcacacgaccccgatcctcctcagcaacaacttcatcgagcccctggagatcacgaaggagatatacgacctgaacaacccggagaaggagcccaagaaattccagaccgcctacgccaagaagacaggcgaccaaaagggttacagggaggccctctgcaagtggatcgacttcactagggacttcctgtccaagtacaccaagactacctctatcgacctgtccagcctccgcccgtcgtcccagtacaaagatttgggcgagtattacgcggagctgaacccactgctctaccacatcagcttccagcgcatcgcggagaaggagatcatggacgcagtggagacgggcaagctatacctatttcagatatacaacaaagacttcgctaagggacaccacggcaagcctaacctgcacaccctctactggacggggctcttcagcccggagaacctcgccaagacctcgatcaagctcaacggccaggccgagctgttctaccggcccaagtcccgcatgaagcggatggcccaccggctcggggagaaaatgctcaacaagaaattgaaggaccaaaaaacgccgatacccgacaccctataccaggagctgtacgactatgtgaaccaccgcctgagccacgacctcagcgacgaggcgcgggccctcctgccgaacgtcatcacaaaggaggtcagccacgagatcatcaaggaccggcgcttcacctccgacaagtttttctttcacgtgcccatcacgctcaactaccaggccgccaactcgccgtccaagttcaaccagcgcgtgaacgcctacctcaaggagcaccccgagaccccgatcatcgggattgaccgaggggagcggaacctcatctacatcaccgtcatcgacagcaccgggaagatccttgaacagcggtcgctcaacaccatccagcagttcgactaccagaagaaactcgacaaccgggagaaggagagagtggcggcccgccaggcttggtccgtcgtcgggacgattaaggacttgaaacaaggttacctgtcgcaagtgatccacgagatcgttgacctgatgatccactaccaagccgtcgtggtcctggagaacctcaacttcggcttcaagagcaaacgaaccggcatcgcggagaaggccgtgtaccagcagttcgaaaaaatgctgatcgacaagctgaactgcctcgtgctcaaggactaccccgctgagaaggtcggcggggtgctgaacccgtaccagctcactgaccagttcaccagcttcgcaaagatgggcacccagtccggcttcctgttctacgtgcctgcgccatacacctcgaagatcgacccgctcaccgggttcgtggaccccttcgtctggaagaccatcaagaaccacgagagccgcaagcacttcctggagggcttcgacttcctccactacgacgtcaagaccggggacttcatcctgcacttcaagatgaaccgcaacctcagtttccagcgcggcctgccggggttcatgcccgcttgggatatagtcttcgagaagaatgagacgcagttcgacgcgaagggcaccccgttcatcgccgggaagcgcatcgtgccggtcatcgagaaccaccggttcaccgggcgctaccgcgacctatacccggcgaacgagttgatcgccctcctggaggagaagggcatcgtgttccgcgacggctccaacatcctcccgaagctgctcgaaaacgacgactcccacgccatcgacacgatggtcgcgctgatccggtcggtgctccagatgcggaactccaacgccgcgacgggcgaggactacatcaacagtccggtccgcgatctgaacggcgtctgcttcgactcccggttccagaaccccgagtggccgatggacgcggacgcgaacggcgcataccacatcgccctaaaagggcaattgctgctcaaccacctcaaggaatccaaagacctaaagctccagaacggcatctccaaccaggactggctggcgtacatccaggaactgcggaacgggagcaaaaaacgtcggatcaagcaagattga

SEQ ID NO: 68 - DNA, 3987 bp, Synthetic construct
  source 1..3987: mol_type = other DNA
atggcgggctccaagaaacgccggattaagcaagatacccagttcgaggggttcacgaacctctaccaagtgagcaagaccctccgattcgaactgattcctcaggggaagaccctcaagcacatccaggagcaagggttcatcgaggaggacaaggcgcggaacgaccactacaaggaactcaaacccatcatcgaccgcatctacaagacctacgccgatcagtgcctccagctcgtgcagttggactgggagaacctcagcgcggccattgactcctaccggaaggagaaaacggaggagacgcgcaacgcgctcatcgaggaacaggcaacctatcgcaacgccatccacgactacttcatcgggaggactgacaacctcactgacgcgattaacaagcgccacgcggagatatacaagggactcttcaaagcggagctgtttaacggcaaggttctcaagcaactcggcactgtgaccacgaccgagcatgagaacgccctgctccgctccttcgacaagttcaccacctacttctccgggttctaccgcaaccgcaagaatgtcttcagcgcggaggacatcagcacggccattccacatcgaatcgtccaagataacttcccgaagttcaaggagaactgccacatcttcacccgactcattactgctgtaccgtcgttacgcgaacacttcgagaacgtcaagaaggcaattggaatcttcgtctctacgtcaatagaggaggtgttcagcttccctttctacaaccagctccttacgcagacccagatagacctgtacaatcagctcctcggtgggatcagccgggaggcggggactgagaagattaaagggctcaacgaggtcttgaacctggccatccaaaaaaacgatgagacggcgcacatcatcgcctcgctgccccaccggttcatcccgctgttcaagcagatcctcagtgacaggaacaccttgagctttatcctagaggagttcaagagcgacgaggaggtgatccagagcttctgcaagtacaaaaccctgctgaggaacgagaacgtcctggagacggcggaggcgctgttcaacgagctgaactctatcgacttaactcacatattcatctcgcacaagaagctggagactattagctctgcactctgcgaccactgggacaccctccgcaacgcgctctacgagcgccgcatctcggagctgaccgggaagatcaccaaatccgcgaaggaaaaggtccagcgttccctcaaacacgaggatattaacttacaggagattatctcagcggctgggaaggagttgtcagaggcgttcaagcagaaaacttccgagatcctgagccacgcgcacgcagcgctcgaccagcctctgcccaccaccctcaaaaagcaggaagaaaaagagatcctcaagagccagttggactccctgctggggctctatcaccttctcgactggttcgccgtcgatgagtcgaacgaggtggaccccgagttctccgcccggctgaccggcatcaagctagagatggagccgtccctcagcttctacaataaggcccgcaactacgcgaccaaaaaaccctacagcgtggagaagttcaagctgaacttccagatgccgaccttagcacgcggttgggacgtaaacagggagaagaacaatggagccatcctgttcgtcaagaacgggctttactacctcgggataatgcccaagcagaagggccgctacaaggccctttccttcgagccgacggagaaaacctccgaggggttcgacaagatgtactacgactacttccccgacgccgccaagatgatcccgaagtgctcaacgcagctaaaagccgtgaccgcccacttccagacccacacgacgccgatcctgctgagcaacaacttcatcgagccccttgagatcactaaggagatatacgacctgaacaaccccgagaaggagcccaagaagtttcaaaccgcctacgccaaaaaaactggcgaccaaaagggctacagggaggcgctgtgtaagtggatcgacttcacacgcgacttcctttcgaagtatacgaagacaacctctattgacctgagcagcctgcgtcctagctcccagtacaaagatttgggcgagtactacgcggagcttaatccactactctaccacatctcattccagcgcatcgctgagaaggaaatcatggacgcggtggagacaggcaaactgtacctcttccagatatacaacaaagacttcgctaaggggcaccacgggaagcccaaccttcatacgctctactggacgggcctattcagccccgaaaatctggccaagacctccatcaagctgaacggccaagcggagctgttctacagacccaagagccggatgaagcggatggcccacaggctcggcgagaaaatgcttaacaaaaagttgaaggaccagaaaacccctatccccgacaccctctaccaggaactgtacgactacgtgaaccacaggctctcgcacgacctttccgacgaggcccgtgccctactcccgaacgtcattaccaaagaggtttcgcacgagatcatcaaggaccggcggttcacgagcgacaagtttttctttcacgtccccatcacccttaactaccaggcggccaactccccatccaagttcaaccagcgtgtgaatgcctacctcaaggagcacccagagaccccgatcattgggatcgaccggggcgagcggaacctgatctacatcaccgtcatcgactcgacgggcaagattcttgagcagagatcgttgaataccatacagcagttcgactaccagaagaaactcgacaaccgcgagaaggagcgcgtggcggcccgccaggcgtggtccgtcgttgggacgattaaggacttgaaacaaggttatctgtcccaagtcatccacgagatcgttgatctgatgatccactatcaggcagtggtggtgctggagaatctcaacttcggcttcaagagtaagcggacgggaatcgccgagaaggccgtgtaccagcagttcgagaagatgctgatcgacaagctcaactgccttgtgctgaaagactacccggccgagaaggtcggcggcgtcctcaacccgtaccaacttaccgaccagttcacctccttcgccaagatgggcactcagtccgggttcttgttctacgtccccgcaccttacacctctaagatcgaccctctgactggcttcgtagatccattcgtgtggaagaccattaagaaccacgagagccgcaagcacttcctggagggcttcgacttcctgcactacgacgtgaagaccggggacttcatccttcacttcaagatgaaccggaacctcagcttccagcggggcctgccggggttcatgcccgcctgggacatcgtgttcgagaagaacgagacccagttcgacgcgaagggcacgcccttcatcgccgggaagcgtatcgtgccggtgatcgagaaccatcgtttcacgggtcgctaccgtgacctctacccggcgaacgagcttatcgcactcctggaggagaagggcatcgtcttccgggacggctccaacatcctcccgaaactgctggaaaacgacgactctcacgccatcgacacgatggtggccctcatccggtccgtgctccaaatgcggaacagcaacgccgccaccggtgaggactacatcaacagcccggtccgggatctgaacggggtgtgcttcgattcgcggttccagaatcctgagtggccgatggacgcggatgcaaacggggcgtaccacatcgcgctcaagggccagttacttctgaaccaccttaaggagtctaaagatttgaaactccagaacgggatctcgaaccaggactggctggcctacatccaagagttgcggaacggcagcaagaagcggcggattaagcaagattag

SEQ ID NO: 69 - protein, 1129 aa, Alicyclobacillus acidoterrestris
MAVKSIKVKLRLDDMPEIRAGLWKLHKEVNAGVRYYTEWLSLLRQENLYRRSPNGDGEQECDKTAEECKAELLERLRARQVENGHRGPAGSDDELLQLARQLYELLVPQAIGAKGDAQQIARKFLSPLADKDAVGGLGIAKAGNKPRWVRMREAGEPGWEEEKEKAETRKSADRTADVLRALADFGLKPLMRVYTDSEMSSVEWKPLRKGQAVRTWDRDMFQQAIERMMSWESWNQRVGQEYAKLVEQKNRFEQKNFVGQEHLVHLVNQLQQDMKEASPGLESKEQTAHYVTGRALRGSDKVFEKWGKLAPDAPFDLYDAEIKNVQRRNTRRFGSHDLFAKLAEPEYQALWREDASFLTRYAVYNSILRKLNHAKMFATFTLPDATAHPIWTRFDKLGGNLHQYTFLFNEFGERRHAIRFHKLLKVENGVAREVDDVTVPISMSEQLDNLLPRDPNEPIALYFRDYGAEQHFTGEFGGAKIQCRRDQLAHMHRRRGARDVYLNVSVRVQSQSEARGERRPPYAAVFRLVGDNHRAFVHFDKLSDYLAEHPDDGKLGSEGLLSGLRVMSVDLGLRTSASISVFRVARKDELKPNSKGRVPFFFPIKGNDNLVAVHERSQLLKLPGETESKDLRAIREERQRTLRQLRTQLAYLRLLVRCGSEDVGRRERSWAKLIEQPVDAANHMTPDWREAFENELQKLKSLHGICSDKEWMDAVYESVRRVWRHMGKQVRDWRKDVRSGERPKIRGYAKDVVGGNSIEQIEYLERQYKFLKSWSFFGKVSGQVIRAEKGSRFAITLREHIDHAKEDRLKKLADRIIMEALGYVYALDERGKGKWVAKYPPCQLILLEELSEYQFNNDRPPSENNQLMQWSHRGVFQELINQAQVHDLLVGTMYAAFSSRFDARTGAPGIRCRRVPARCTQEHNPEPFPWWLNKFVVEHTLDACPLRADDLIPTGEGEIFVSPFSAEEGDFHQIHADLNAAQNLQQRLWSDFDISQIRLRCDWGEVDGELVLIPRLTGKRTADSYSNKVFYTNTGVTYYERERGKKRRKVFAQEKLSEEEAELLVEADEAREKSVVLMRDPSGIINRGNWTRQKEFWSMVNQRIEGYLVKQIRSRVPLQDSACENTGDI

SEQ ID NO: 70 - DNA, 4101 bp, Synthetic construct
  source 1..4101: mol_type = other DNA
gacaagaagtactccattggcctggcgattgggacaaactcggtggggtgggccgtgattacggatgagtacaaggttccaagcaagaagttcaaggtcctcgggaacacagatcggcattcgattaagaagaatctcattggggcgctcctcttcgactcgggggagacagcggaggctaccaggctcaagcggacagccaggcggcggtacacaaggcggaagaatcgcatctgctacctccaggagattttctcgaatgagatggcgaaggtggacgacagcttcttccatcggctggaggagtccttcctggtggaggaggataagaagcacgagaggcatccaattttcgggaacatcgtggacgaggttgcgtaccatgagaagtaccctacaatctaccatctgcggaagaagctggttgactccacagacaaggcggacctgaggctgatctacctcgctctggcccacatgattaagttccgcgggcatttcctgatcgagggggacctgaatcccgacaattcggatgtggacaagctcttcatccagctggtgcagacctacaaccagctgttcgaggagaatcccatcaatgcgtcgggcgttgacgctaaggccattctgtccgctaggctgtcgaagagcaggaggctggagaacctgatcgcccagctgccaggcgagaagaagaatgggctcttcgggaatctgattgcgctctccctggggctgacaccgaacttcaagagcaatttcgatctggctgaggacgcgaagctccagctctcgaaggacacttacgacgatgacctcgataacctcctcgcgcagatcggggaccagtacgctgatctcttcctcgccgctaagaacctctcggatgctatcctgctctccgacattctccgggttaataccgagattacaaaggccccactgtcggcgtccatgatcaagcggtacgatgagcatcatcaggatctcaccctgctcaaggccctcgtgcggcagcagctgcccgagaagtacaaggagattttcttcgaccagagcaagaatgggtacgctggctacattgacggcggggcctcacaggaggagttctacaagttcatcaagccaatcctggagaagatggatgggacagaggagctgctggtgaagctcaaccgggaggatctgctcaggaagcagcggacgttcgacaacgggtcgattccccatcagatccacctgggggagctgcacgcgatcctgcgccggcaggaggatttctaccctttcctgaaggataatcgggagaagatcgagaagattctcaccttccggattccctactacgtcgggccactcgcgcggggcaatagcaggttcgcctggatgacacggaagagcgaggagacaatcaccccctggaacttcgaggaggttgtcgacaagggggcgtccgcccagtcattcattgagcggatgaccaatttcgacaagaatctgccaaatgagaaggttctcccaaagcatagcctcctctacgagtacttcactgtttacaacgagctgaccaaggtgaagtatgtgaccgagggcatgcggaagcccgcgttcctgtccggcgagcagaagaaggccattgtggacctcctgttcaagaccaatcgcaaggtcacagtcaagcagctcaaggaggattacttcaagaagatcgagtgcttcgactcggttgagattagcggggtggaggatcggttcaacgcgagcctcggcacttaccacgacctcctgaagatcatcaaggataaggacttcctcgacaacgaggagaacgaggatattctggaggacatcgtgctcaccctgacgctgttcgaggatcgggagatgatcgaggagcgcctgaagacctacgctcatctcttcgatgataaggtcatgaagcagctgaagaggaggcggtacaccgggtggggccgcctgagcaggaagctcattaacgggatcagggacaagcagagcggcaagaccatcctggacttcctcaagagcgatggcttcgccaaccggaatttcatgcagctcatccacgacgactccctcaccttcaaggaggacattcagaaggctcaggtcagcggccagggcgactcgctgcatgagcacatcgctaacctggcgggcagcccagccatcaagaagggcatcctccagacagtgaaggtcgtggatgagctggtgaaggtcatgggccggcataagcccgagaatattgtgattgagatggcgcgggagaatcagaccactcagaagggccagaagaactcgcgggagcgcatgaagaggatcgaggaggggattaaggagctgggcagccagattctcaaggagcaccccgtggagaatacccagctccagaacgagaagctgtacctctactacctccagaatgggcgggacatgtatgttgatcaggagctggacatcaatcgcctctcggattacgacgtggaccacatcgtgccccagagcttcctgaaggatgatagcatcgacaataaggtcctgacccgctccgacaagaatcgcggcaagagcgacaacgtgccgagcgaggaggtcgtgaagaagatgaagaactactggcggcagctgctgaacgcgaagctcattacacagcggaagttcgataacctgacgaaggcggagaggggcggcctctccgagctggacaaggcgggcttcattaagaggcagctcgtggagactcgccagatcaccaagcacgtggctcagatcctcgatagccggatgaatacgaagtacgatgagaatgacaagctcatccgggaggtgaaggtaatcaccctgaagtcaaagctcgttagcgatttccggaaggacttccagttctacaaggtgcgggagattaacaactaccatcatgcgcacgatgcgtacctcaatgcggtggtgggcacagccctgattaagaagtaccccaagctggagagcgagttcgtctacggggactacaaggtgtacgatgttcggaagatgatcgccaagagcgagcaggagattgggaaggccaccgctaagtacttcttctactcgaatattatgaatttcttcaagaccgagatcacactcgctaatggggagattcggaagcggcccctcatcgagactaacggggagactggcgagattgtgtgggacaaggggcgcgacttcgctaccgtgcgcaaggtcctctcgatgccccaggttaatattgttaagaagacagaggtgcagacgggcgggttctccaaggagtctatcctgccgaagcggaactcggacaagctgatcgcccgcaagaaggattgggaccccaagaagtacgggggattcgatagcccaaccgtggcttacagcgtcctggtggtcgccaaggttgagaaggggaagtcgaagaagctcaagagcgttaaggagctgctgggcatcaccatcatggagcggtccagcttcgagaagaatcctatcgacttcctggaggctaaggggtacaaggaggtcaagaaggacctgatcattaagctgcccaagtactctctgttcgagctggagaacgggaggaagcggatgctggcgtctgctggcgagctacagaagggcaatgagctggcgctcccctcgaagtatgtcaacttcctctacctggcttcccattacgagaagctgaagggctcgcccgaggataatgagcagaagcagctcttcgtggagcagcacaagcactacctcgacgagatcattgagcagatttcggagttctcgaagcgggtcattctcgcggacgcgaacctcgacaaggtcctctcggcgtacaacaagcaccgggacaagcccatccgggagcaggccgagaacattatccacctcttcacactgaccaacctcggcgctcccgccgcgttcaagtacttcgacaccaccattgaccgcaagagatacacatccaccaaggaggtgctggacgcgaccctcatccaccagagcatcacaggcctctacgagacacggatcgacctctcgcagctcgggggcgat

SEQ ID NO: 71 - DNA, 4092 bp, Synthetic construct
  source 1..4092: mol_type = other DNA
gacaagaagtactcgatcggcctggcgattggcacaaacagcgtggggtgggctgtgatcactgatgagtacaaggtgccatcgaagaagttcaaggtgctggggaatacagaccggcattcgatcaagaagaatctcattggcgctctcctcttcgattccggcgagactgctgaggcgacccgcctgaagcgcaccgcccggcggcgctacactcggcggaagaataggatttgctacctccaggagattttctcgaatgagatggccaaggtggatgacagcttcttccaccgcctggaggagtcgttcctggtcgaggaggacaagaagcatgagcggcaccctatcttcgggaatatcgttgatgaggtcgcctaccacgagaagtaccccactatctaccatctccgcaagaagctcgtggacagcacagataaggccgacctccgcctgatctacctcgccctcgcgcacatgattaagttccgggggcacttcctcattgagggggatctgaatcccgataactccgacgtggacaagctgttcatccagctggtgcagacatacaaccagctgttcgaggagaatcccatcaacgcgagcggcgtggacgctaaggccattctgtcggctaggctctcgaagtcgaggcggctggagaacctgattgcgcagctccccggcgagaagaagaacgggctgttcgggaatctcatcgccctctccctcggcctcacaccaaacttcaagagcaatttcgacctggctgaggacgctaagctgcaactctcaaaggatacatacgatgacgacctggacaatctcctggctcagatcggcgaccagtacgctgacctgttcctcgcggccaagaatctgtcggacgcgattctcctcagcgacatcctgcgcgtcaataccgagattacgaaggctccactgtctgcgtcaatgattaagcggtacgatgagcatcaccaggatctgaccctcctgaaggcgctcgtgcggcagcagctgcccgagaagtacaaggagattttcttcgatcagagcaagaatggctacgccggctacatcgacgggggcgcgagccaggaggagttctacaagttcatcaagcccatcctggagaagatggacggcaccgaggagctactcgtgaagctcaatcgggaggatctcctccggaagcagcggacattcgataacgggtctatcccacaccagatccacctcggcgagctgcatgcgattctgcggcggcaggaggatttctaccctttcctgaaggacaaccgggagaagatcgagaagatcctcacattccggattccatactacgtcggccccctggcgaggggcaatagccggttcgcgtggatgacaaggaagtccgaggagactattaccccgtggaatttcgaggaggtggttgacaagggcgcttccgcgcagagcttcattgagcggatgacaaacttcgacaagaatctccccaacgagaaggtcctgccgaagcatagcctcctgtacgagtacttcaccgtctacaatgagctaactaaggtcaagtatgtgacagagggcatgaggaagccagccttcctctcaggcgagcagaagaaggccattgtggacctcctgttcaagacaaaccgcaaggtgacagtgaagcagctgaaggaggattacttcaagaagattgagtgcttcgactcagtggagatttcaggcgtggaggatcggttcaacgcgagcctggggacttaccacgacctgctgaagattattaaggacaaggacttcctggataacgaggagaatgaggacatcctggaggatattgtgctcaccctcaccctgttcgaggacagggagatgattgaggagaggctcaagacctacgcgcacctgttcgatgacaaggtcatgaagcagctgaagaggcggcgctacactgggtggggccgcctgtcgcggaagctgatcaacggcattcgggataagcagtccgggaagaccattctggatttcctgaagtcggacggcttcgccaacaggaatttcatgcagctgatccacgacgactccctcaccttcaaggaggacattcagaaggcccaggttagcggccagggggactcactccacgagcatattgccaatctggccggctctccagctatcaagaagggcatcctgcaaacagttaaggttgttgacgagctggttaaggtcatggggcggcataagcccgagaacattgtcatcgagatggctcgggagaaccagacaactcagaagggccagaagaactccagggagcgcatgaagcggattgaggagggcattaaggagctggggtcccagatcctcaaggagcaccctgtcgagaacactcagctgcaaaacgagaagctctacctgtactacctccagaacgggcgggatatgtatgtggatcaggagctggacatcaacaggctctccgactacgacgtggatcacattgtcccacagtctttcctcaaggatgattccatcgacaacaaggtgctgacgcgcagcgacaagaatagggggaagtcggacaacgttccgagcgaggaggtcgtgaagaagatgaagaattactggaggcagctcctgaatgcgaagctgatcactcagaggaagttcgacaatctgacaaaggcggagaggggcgggctctcggagctggataaggcgggcttcatcaagcggcagctcgttgaaacccggcagatcaccaagcatgtcgcccagatcctcgatagccgcatgaacaccaagtacgatgagaacgacaagctcattcgggaggttaaggtcattacgctgaagtccaagctcgtcagcgacttcaggaaggatttccagttctacaaggttcgggagattaacaactaccaccacgcgcatgatgcgtacctgaacgctgttgtcggcactgctctcatcaagaagtacccaaagctggagtccgagttcgtctacggggactacaaggtctacgatgtccggaagatgatcgccaagtcggagcaggagatcgggaaggctactgcgaagtacttcttctacagcaacattatgaatttcttcaagacggagattacgctggcgaacggggagattaggaagaggcccctcattgagactaatggggagacaggcgagattgtttgggacaagggccgcgacttcgcgactgtgcggaaggtcctgtccatgccacaggtgaatattgttaagaagacagaggtgcagactgggggcttctcgaaggagagcattctcccaaagcggaacagcgataagctcatcgcgcgcaagaaggattgggaccctaagaagtacggcggcttcgattctcccactgtggcctactccgttctcgtggttgccaaggttgagaaggggaagtcgaagaagctgaagtcggtcaaggagctgctcgggattacaatcatggagcggagcagcttcgagaagaaccctattgatttcctggaggccaagggctacaaggaggttaagaaggatctcattatcaagctccctaagtactctctgttcgagctggagaatggccggaagaggatgctggcctcggctggcgagctacagaaggggaatgagctggccctcccgtcgaagtatgtgaatttcctgtacctcgcgtcgcactacgagaagctcaagggcagcccggaggataatgagcagaagcagctcttcgtggagcagcataagcactacctggacgagatcattgagcagatcagcgagttctcgaagcgggttattctggctgatgctaacctggacaaggttctgagcgcctacaataagcatcgcgacaagccgattcgcgagcaggcggagaatattatccacctgttcaccctcactaacctcggggctcccgcggccttcaagtacttcgataccacaatagataggaagcggtacacctcgacgaaggaggtcctcgacgccacactcatccatcagtcgattacaggcctgtacgagacacggattgacctctcgcagctg

SEQ ID NO: 72 - DNA, 4101 bp, Synthetic construct
  source 1..4101: mol_type = other DNA
gacaagaagtattccataggcctggctatcggcaccaacagcgtgggctgggccgtcatcaccgacgagtacaaagtgccgagtaaaaagttcaaagtgctcggcaacaccgaccgccactccataaagaaaaacctgatcggggcgctcctgttcgacagcggcgagacggcggaggccacccgcttgaaacgcacggcccgacggcgctacacgcggcgcaagaaccggatctgttacctacaggagattttctctaacgagatggcgaaggtggacgactcgttctttcaccgcctcgaagagtccttcctcgtggaggaggacaagaaacacgagcgccacccgatcttcggcaacatcgtggacgaggtggcctaccacgagaagtacccgaccatctaccacctccggaagaaactcgtggacagcacggacaaggccgacctgaggctcatctacctcgccctggcgcacatgattaagttccggggccacttcctgatcgagggcgacctgaacccggacaacagcgacgtggacaagctgttcatccagctagtccagacctacaaccagcttttcgaggaaaaccccatcaacgccagcggggtggacgcgaaggcgatcctgtccgcccggctgagcaagtcccggcggctggagaacctcatcgcgcagttgcccggcgagaagaagaacgggctgttcgggaacctgatcgccctctccctggggctcaccccgaacttcaagtccaacttcgacctcgccgaggacgccaaactacagctgagcaaggacacctacgacgacgacctcgacaacctgctggcccagatcggggaccagtacgcagacctgttcctcgccgccaagaacctctccgacgccatcctgctgtcggacatcctgcgggtgaacacggagatcacgaaggccccgctctcggcctcgatgattaaacgctacgacgagcaccaccaggacttgaccctcctcaaggcgctggtccgccagcagcttcccgagaagtacaaggaaatctttttcgatcagagcaagaacgggtacgccgggtacatcgacggcggggcgtcccaggaggagttctacaagttcatcaagcccatcctggagaaaatggacgggaccgaggagctgctcgtgaagctcaaccgcgaagatttgctccgcaagcagcgcacgttcgacaacgggtcgatcccgcaccagatccacctgggcgagctgcacgcgatcctcaggcgtcaggaagacttctaccccttcctcaaggacaaccgcgagaagatagagaagattctgaccttcagaattccttattacgtgggcccgctggctcggggcaactcgcgcttcgcctggatgacgcgcaagtccgaggagaccatcaccccgtggaacttcgaggaggtggtggataagggtgcctcggcccagtccttcatcgagcggatgaccaacttcgacaagaacctgccgaacgagaaggtgctccccaagcacagcctgctctacgaatatttcacggtgtacaacgagctgacgaaggtcaagtacgtgaccgagggaatgaggaaacctgcattcctctccggggagcagaagaaagccatagtcgacctcctgttcaagaccaaccggaaggtcaccgtcaagcagctcaaggaggactacttcaagaagatcgagtgcttcgattcagtggagatcagcggcgtcgaggaccggttcaacgccagcctgggcacctaccacgacctgctcaagatcatcaaggacaaggacttcctcgacaacgaggagaacgaggacatcctggaggacatcgtgctgaccctgacgctcttcgaggaccgcgagatgatcgaggagcgcctcaagacctacgcccacctgttcgacgacaaggtgatgaagcagctcaagcggcggagatatactgggtggggccgcctctcccggaagctcattaacggtatcagggataagcagtccgggaagacgatcctcgacttcctcaagtcggacgggttcgccaaccgcaacttcatgcagctcatccacgacgactccctgacgttcaaggaggacatccagaaggcccaagtgtctggtcaaggtgactcgctccacgagcacatcgccaacctcgcgggcagcccggccatcaagaagggaatactccagaccgtcaaggtggtggacgagctggtgaaggtcatgggccgccacaagccggagaacatcgtcatcgagatggcgcgggagaaccagaccacgcagaaggggcagaaaaatagccgtgagcgcatgaagcgcatcgaggaggggattaaggagttgggcagccagatcctcaaggagcaccctgtggagaacacgcagttgcaaaacgagaagctctacctgtactacctccagaacgggagggatatgtacgtggaccaagaactggacatcaaccgcctgtccgactacgacgtggaccacatcgtgccgcagagcttcctcaaggacgacagcatcgacaacaaggtgctcacccggtccgacaagaatcggggcaagtccgacaacgtgcccagcgaggaggtcgtcaaaaagatgaaaaactactggcgacaactactgaacgccaagctcatcacccagcgcaagttcgacaacctcacaaaagccgagcgcggcgggttgagcgagctggacaaggccgggttcatcaagcgccagctcgtcgagacgcgccagatcacgaagcacgtcgcgcagatactcgacagccggatgaacaccaagtacgacgagaacgacaagctcatccgggaggtgaaggtcatcaccctcaagtcgaagctcgtgagcgacttccgcaaggacttccagttctacaaggtccgggagatcaacaactaccaccacgcccacgatgcttatcttaacgccgtggtggggacggccctcattaagaaatacccgaagctggagtcggagttcgtgtacggcgactacaaggtgtacgacgtcaggaagatgatcgccaagtccgaacaggagatcgggaaggccacggcgaaatacttcttctacagcaacatcatgaacttcttcaagaccgagatcaccctcgccaacggcgagatccgcaagcgcccgctcatcgagacgaacggggagaccggcgagatcgtctgggacaaggggcgcgacttcgccactgtgcggaaggtgctgtcgatgccccaggtcaacatcgtcaagaagacggaggtccagacgggcgggttcagcaaggagagcatcctgccgaagcgcaacagcgacaagctgatcgcccgcaaaaaggactgggatccaaaaaagtacggcggcttcgacagccccaccgtcgcctacagcgtcctcgtcgtcgctaaagtcgagaagggcaagtccaaaaagctcaagagcgtcaaggagctgctcgggatcaccatcatggagcggtccagcttcgagaagaacccaattgatttcctggaggcgaagggctacaaggaggtcaagaaagacctcatcataaagctgccgaagtactcactcttcgagctggagaacgggcgcaagcggatgctggcgtcggccggagagctccaaaagggcaacgagctggcgctgccgagcaagtacgtgaacttcctctacctggcgtcccactacgagaagctcaagggcagtccagaggataacgagcagaagcagctattcgtggagcagcacaagcactacctggacgagatcatcgagcagatcagcgagttctccaagcgcgtcatcctggcggacgccaacctggacaaggtgctgtccgcgtacaacaagcaccgcgacaagccgatccgcgagcaagccgagaacatcatccacctgttcaccctcacgaacctcggggcacccgccgccttcaaatatttcgacacgaccatcgaccgcaagcgctacaccagcacgaaggaggtgctcgacgccaccctgatccaccagagcatcaccgggctgtacgagacccgcatcgacctctcgcagctcggcggggac

SEQ ID NO: 73 - DNA, 4101 bp, Synthetic construct
  source 1..4101: mol_type = other DNA
gacaagaagtacagtattggattggccatcgggacgaacagcgtgggctgggccgtcatcaccgacgagtacaaggtgccatccaagaagtttaaggttctggggaataccgaccgccactcgatcaagaaaaatctcatcggggcgctgcttttcgacagcggcgagacggcggaagcgacgcggctcaagcggacggctcgtcgccgttacacccggcgtaagaaccgcatctgttacctccaggagatattcagcaacgagatggcgaaggtggacgactcctttttccaccgtcttgaggagtccttcctggtcgaggaggacaagaagcacgagcgccacccgatcttcgggaacatcgtggacgaggtggcctaccacgagaagtaccccacgatctaccacctccgcaaaaaactcgtggactcaactgacaaggccgatttgaggcttatctacctcgccctcgcccacatgattaagttccgtgggcacttcctaatcgagggtgacctcaaccccgacaactctgacgtggacaagctgttcatccagcttgtgcagacctacaatcagctctttgaggagaatccgatcaacgcatctggtgtggacgcaaaggccatcctcagcgcgcggctgagcaagtctaggcggttggagaacctgatcgcccaactgcccggcgagaagaaaaatggcctcttcggcaacctgatcgccctgtcgctggggctcacgccgaacttcaagagtaactttgacctggcggaggacgctaagctccagctatctaaggacacatacgacgacgacctggacaacctgctggcccagatcggcgaccagtacgccgacctcttcctagccgccaagaacctgtccgacgccatcctcctcagcgacatcctgcgcgtgaacacggagatcacgaaggctccgctcagcgcctccatgattaagcggtacgacgagcaccaccaagacctaactttactcaaagccctcgtgcggcagcagcttcccgagaagtacaaagagatattttttgatcagtccaagaacggttatgcgggctacatcgacggcggcgcgagccaggaggagttctacaagttcatcaagcccatcctggagaagatggacggcacggaggagctgctcgtgaagctcaaccgtgaagacctcctgcgaaagcagcgaaccttcgacaacggttcgatcccgcaccagatccacctcggggagctgcacgccatcctgaggcgacaggaggacttctaccctttcctaaaggacaaccgcgagaagattgaaaaaatcctgacgtttcgcataccctactacgtcggcccgctggcgcgcggcaactcccggttcgcctggatgacccgtaagagcgaggagacgatcaccccgtggaacttcgaggaggtcgtggacaagggcgcgagcgcgcagagcttcatcgagcgcatgaccaacttcgacaagaacctcccgaacgagaaggtgctcccaaagcactccctcctgtacgagtatttcaccgtgtacaacgagttgacaaaggtgaagtacgtgacggagggaatgcggaagcctgcgttcctctcgggcgagcagaagaaggcaatcgtggacctgctcttcaagaccaaccggaaggtgacggtgaagcagctcaaggaggactacttcaaaaaaatcgagtgcttcgactccgtggagataagcggcgtggaggaccgattcaacgcctccctcggcacctaccacgacctccttaagatcatcaaggacaaggacttcctggacaacgaggagaacgaggacatcctggaggacatcgtgctcaccctgaccctcttcgaggaccgggagatgatcgaggagcgcctcaagacgtacgcccacttgttcgacgacaaggtgatgaagcagctcaagcggcggcgatacaccgggtggggccgcctatcccgcaaacttatcaacggcatccgcgacaagcagtccggcaagacgatcctggatttcctcaagtcggacgggttcgccaaccggaacttcatgcagctcatccacgacgacagcctcacgttcaaggaggacatccagaaggcccaagtgagcggtcaaggggacagcctccacgagcacattgcgaaccttgctgggagccctgcgatcaagaaggggatattgcaaaccgtgaaggtcgtggacgagttggtgaaggtcatggggcgacacaagcccgagaacatcgtgatcgagatggccagggaaaatcagaccacgcagaagggccaaaaaaacagccgcgagcggatgaagcggatcgaggagggcatcaaggagctggggtcgcagatcctcaaggagcacccggtggagaacacgcagctccagaacgagaagctgtacctctattacctacagaacgggcgggatatgtacgtggaccaggagctagacatcaaccgcctgtccgactacgacgtggaccatatcgtcccgcagtcgttcttgaaggacgacagcatcgacaacaaggtgctcacaagatcggataagaatcgaggcaagtccgacaacgtgccctcggaggaggtggtcaagaaaatgaaaaactactggcggcagttgctgaacgccaagctcattacgcagcggaagttcgacaacctgacgaaggctgaacgtggtgggctcagcgagctagacaaggcggggttcatcaagcggcagctcgtcgagacccggcagatcaccaagcacgtggcgcagatcctggactcgcgcatgaacaccaagtacgacgagaacgacaagctcatccgtgaggtgaaggtcatcacccttaagtctaagctggtcagtgacttccgcaaggacttccagttctacaaggtccgggagatcaacaactaccaccacgcgcacgacgcctacctcaacgcggtggtggggacggcgcttattaagaaatatcccaagctggaaagcgagttcgtttacggcgactacaaggtgtacgacgtccgcaagatgatcgcaaagtcggaacaggaaatcggaaaggcgacggccaaatatttcttttactccaacatcatgaatttttttaagacggagatcaccctggcgaacggggagatccgcaagcggcccctcatcgagaccaacggggagacgggcgagatcgtctgggacaagggccgggacttcgccaccgtgcggaaggtgctttctatgcctcaagtcaatatcgtcaaaaagacagaggtgcagaccggcgggttcagcaaggagtctatcctgccgaagcgcaactcggacaagctcatcgcgcgcaagaaagactgggaccccaaaaaatatggcgggttcgactcgccgaccgtcgcctacagcgtcctcgtggtggctaaggtcgagaagggcaagagcaaaaagctaaagtcggtgaaggagctgctgggcatcaccatcatggagcgctcgtctttcgagaagaatccaatcgacttcctagaggcgaaggggtacaaggaggtcaaaaaggatcttatcatcaaactgccgaagtacagtctgttcgagctggagaacgggcggaagcggatgctggctagtgcgggcgagttgcagaagggcaacgagttggcactgccctccaagtacgtgaacttcctgtacctggcctcccactacgagaagctcaaggggagccccgaggacaacgagcagaagcagctattcgtcgagcagcacaagcactacctggacgagatcatcgagcagatcagtgagttctccaagcgggtcatcctcgcggacgccaacctggacaaggtgctgagcgcgtacaacaagcacagggacaagccaatcagggaacaggccgagaacatcatccacctgttcaccctgaccaacctgggtgcaccggctgccttcaagtactttgacacgaccatcgaccggaagcgctacacctccacgaaggaggtgctggacgccacgctgatccaccagagcatcaccgggctctacgagacacggatcgacctgagccagcttggcggggac

SEQ ID NO: 74 - DNA, 4092 bp, Synthetic construct
  source 1..4092: mol_type = other DNA
gacaaaaagtattccattggactcgctatcggcacgaacagcgtcgggtgggcggtcatcactgacgagtacaaggtgccgagcaagaagtttaaggtgctgggaaacaccgacaggcactcgatcaagaaaaatcttatcggggccctactcttcgactccggagaaaccgccgaggccacccggttgaagcgcacggcccgccgtcgctacaccaggcgcaagaaccggatctgctacctccaggagatattcagcaatgagatggcgaaggtggacgactcgttttttcacaggctagaggagtctttcctcgtggaggaggacaagaaacacgagcgccaccccatcttcggcaacatcgtggatgaggtggcatatcacgagaagtacccaaccatctaccacctccgcaaaaagctcgtggactctaccgacaaggccgacctccgtctgatctacctcgcgctggcccacatgattaagttccgaggacactttctgatcgagggcgacctgaacccagacaacagcgacgtggacaagctgttcatccaacttgtccagacctacaatcagctcttcgaggagaaccctatcaacgcctcgggcgtggacgcgaaggccatcctgtccgcccgcctgagcaagtcgcggcggctggagaacctgatcgcccagctccccggcgaaaaaaagaacggcctcttcggcaacctcatcgcgttgtcgctggggctcaccccgaacttcaagtccaacttcgacctggccgaggacgctaaactccagctctcgaaggatacctacgacgacgacctcgacaacctgctggcccagatcggcgaccagtacgcggaccttttcctggcggccaagaacctgagcgacgcgatcctccttagcgacatactccgtgtgaacaccgagatcacgaaggccccgctctccgcgtccatgattaagcgctacgacgagcaccaccaagaccttaccctgcttaaggcgctggtcaggcagcagttaccggagaagtacaaggagatcttttttgatcaatctaagaacggttacgccgggtacatcgacggcggcgcgtcccaggaggagttctacaagttcatcaagccgatcttggagaaaatggacgggaccgaggagctgctcgtgaagctcaaccgcgaagacctcctccgcaagcagcgcaccttcgacaacgggagcatcccgcaccagatccacctgggagagctgcacgcgatcctgcggagacaagaggacttctaccccttcctcaaggacaaccgggagaagattgaaaaaatacttacttttcgtatcccgtactacgtcgggccccttgcgaggggcaactccagattcgcgtggatgacccgcaagtccgaggagaccatcaccccgtggaacttcgaggaggtggtggacaagggcgcgtcggcccagtcgttcatcgagcgcatgaccaacttcgacaagaaccttccgaacgagaaggtgctcccgaagcacagcctgctctacgaatattttactgtgtacaacgagctgacgaaggtcaagtacgttacggaggggatgaggaagcccgccttcctctccggcgagcagaagaaagccattgtggatctcctgttcaagaccaaccgcaaggtgacggtgaaacagctcaaagaggactacttcaagaagatcgagtgcttcgactccgtagagatcagcggggtcgaggaccgcttcaacgcctcgctgggcacgtaccacgacctgctaaagattatcaaggacaaagacttcctagacaatgaggagaacgaggacattctggaggacatcgtgctgactctgacgctgttcgaagaccgcgagatgatcgaggagcggcttaagacgtacgcccacctgttcgacgacaaggtgatgaagcagttgaaacggcggcgctacaccgggtggggccgcctctcccgcaagctcatcaacggcatccgcgacaagcagtcggggaagacgatcctggacttcctcaagagcgacggcttcgccaaccgaaacttcatgcagctaatccacgacgacagcctgacgttcaaggaggacatccagaaggcccaagtgagcggccagggagactcgctacacgagcatatcgccaacctggctggcagcccggcgattaagaaaggaatcctccaaaccgtcaaagtggtggacgagctggtgaaggtgatgggccgccacaagcccgagaacattgtgatcgagatggcgcgggagaaccagacgacgcagaagggccaaaaaaatagcagggaaaggatgaagcgaatagaggaggggatcaaggagctggggagccagattctcaaagagcacccggtcgagaacacacagctccagaacgagaagctgtacctctactacctccaaaacggccgcgatatgtacgtggaccaggaactagacatcaaccggctgagcgactatgacgtggaccacatcgtgccgcagtccttcctcaaggacgactcgattgacaacaaagtgctcactagatccgacaagaacagaggcaagagcgataacgtcccgtcggaggaggtcgtcaagaaaatgaaaaactactggcggcagctcctaaacgccaagctcatcacgcagcgtaagttcgacaacctgacgaaggcggagcggggcgggctgagcgagctggacaaagcggggttcatcaagcggcagctcgttgagacgcggcagatcacaaagcacgtcgcgcaaatcctcgactcccgcatgaacaccaagtacgacgagaacgacaagctcatccgggaggtgaaggtcattacccttaaatcgaagctcgtcagcgactttcgtaaggacttccagttctacaaggtcagagagatcaacaactaccaccacgcccacgacgcctatctgaacgccgtggtgggcaccgcgcttattaagaagtaccccaagctggagtccgagttcgtgtacggcgactacaaggtttatgacgtcaggaagatgatcgccaagtcggaacaggagatcggaaaagctaccgccaaatatttcttctatagcaacatcatgaacttcttcaaaaccgagatcaccctcgccaacggcgagatccggaagcgcccgctcatcgagaccaacggggagaccggggagatcgtctgggacaaggggcgggacttcgctactgtccgaaaggtgctctccatgccacaagtgaatatcgtcaagaaaacagaggtgcagaccggagggttcagtaaggagtccatcctgcccaagcggaactccgacaagctaattgctcgcaaaaaggattgggatcctaaaaaatatggcggcttcgactcgcccacggtcgcctactctgtgctggtcgtggcgaaggtggagaagggcaagtccaagaagctcaagagcgtcaaggagctgctggggatcacgatcatggagcgtagttcgtttgagaagaatcccatcgacttcctggaggctaagggctacaaggaggtcaaaaaggacctcatcattaagctgccgaagtacagcctcttcgagctggagaacgggcggaagcgtatgctcgcctccgctggggagttacaaaaggggaacgagctggcgctgccgtctaagtacgtcaacttcctgtacctggcctcccactacgagaagctcaaggggtcgccggaggacaacgagcagaagcagctcttcgtagagcagcacaagcactacctggacgagatcatcgagcagatttcagagttctcaaagcgggtcatcctcgccgacgccaacctggacaaggtgctctcggcctacaacaagcaccgggacaagccgatccgcgaacaggccgaaaacatcatccacctgttcacgctcaccaacctcggtgccccggcggccttcaagtactttgacacgaccatcgaccggaagcgctatacctcgacgaaggaggtgctggacgccaccctgatccaccagtccatcaccgggctttacgagacccggatcgacctctcgcagcta

SEQ ID NO: 75 - DNA, 4101 bp, Synthetic construct
  source 1..4101: mol_type = other DNA
gacaagaagtatagtattggactcgccatcggaaccaactctgtggggtgggctgttattacagatgaatataaggtgccatccaaaaagtttaaagttctgggcaatactgatagacactcaatcaagaagaatctgataggtgcacttctgtttgatagtggagagactgccgaggcaaccagacttaaaaggactgcaagaagaagatataccagaagaaagaataggatttgctatttgcaggaaatcttcagcaacgaaatggccaaggttgatgactcatttttccataggttggaggagagttttcttgtggaggaagataagaagcacgaaagacacccaattttcgggaatatagtggacgaggtggcttatcatgagaagtatcccactatctaccacctgagaaagaaacttgtggactcaaccgataaggctgatcttaggcttatatacttggcccttgcacatatgatcaaattcaggggccattttcttatcgaaggcgatcttaatcccgataactcagatgtggacaagctgtttatacaacttgtgcaaacctacaatcaactcttcgaggagaatcccattaacgcctccggcgtggatgcaaaagccatactgtcagccagactgagcaaaagtaggagactggagaatcttatagcccaactgcccggtgaaaagaagaatgggctcttcggaaatctgatcgctctttcattggggttgacacccaactttaagagtaactttgacttggcagaagatgcaaagttgcagctcagtaaagacacatatgacgatgaccttgacaatctcttggcacaaataggggatcaatacgctgaccttttcctcgctgccaagaacctcagcgacgctatactgttgtccgacattcttagggttaataccgaaattacaaaggcccctcttagtgcaagtatgatcaaaaggtatgatgagcatcaccaagaccttacactgctgaaggctctggttagacagcaactccctgaaaagtataaggaaatattcttcgaccaaagtaagaacgggtacgccggttatattgatgggggcgcaagtcaagaagaattttacaaattcatcaagccaattcttgaaaagatggacgggactgaggaattgctggtgaaactgaatagagaggaccttcttagaaaacagaggacatttgacaatgggtccatcccacaccagattcatctgggggaactccacgcaatattgaggagacaagaagacttttacccattccttaaggataatagagagaaaatcgaaaaaatcctgactttcaggattccttactatgttgggccactggccagggggaactcaagattcgcttggatgacaaggaagtcagaagaaaccataaccccttggaattttgaagaggtggttgataagggggcatcagcccagtctttcatagagaggatgaccaactttgataaaaatcttccaaatgagaaggttttgccaaaacatagtcttttgtacgagtactttactgtttataacgaattgaccaaggtgaagtatgtgaccgagggaatgaggaagccagcatttttgtccggggagcaaaagaaagcaatcgttgatcttctcttcaagaccaacagaaaagtgaccgtgaaacaactgaaggaagactacttcaaaaagatagaatgtttcgattcagtggaaattagcggtgttgaagacaggttcaatgcttcattgggtacttaccacgacctgttgaagataatcaaagacaaggactttctcgataatgaggagaacgaagacatcttggaagacattgtgcttacactcactttgtttgaggacagggaaatgattgaggaaagactcaaaacttacgctcatttgtttgatgataaggttatgaaacaactaaaaagaagaaggtacaccggctggggaagattgagtaggaaactgatcaacggtattagagataaacaatccggaaagactatcctcgatttccttaagagtgatggctttgcaaataggaattttatgcagctgattcatgacgactcacttaccttcaaagaagacatccaaaaagctcaggtgtctgggcaaggcgacagtctgcatgaacatatagctaacttggctgggagtcccgccatcaagaaggggatacttcaaacagttaaagttgtggacgaattggtgaaggtaatgggaaggcacaagcctgaaaatatagtgatagaaatggcaagggaaaatcaaacaacccagaagggacagaagaacagtagggaaaggatgaaaaggatagaagaggggatcaaagagcttggtagccagatcctcaaggaacatccagtggagaatacccaacttcaaaacgagaaactctatttgtactacttgcagaacggaagagatatgtatgtggaccaagagcttgatattaacaggctgagcgattatgacgttgaccacatagtgccccaatcattcctcaaggatgactctattgataataaggtgctgacaaggagtgacaagaatagagggaaatccgacaacgttccatccgaggaagttgtgaagaagatgaagaactactggaggcagttgctgaacgctaagctcattacccagaggaaattcgataacctgaccaaagcagagagaggcgggctgagcgaactcgataaagcaggtttcatcaagagacaactcgtggagactaggcaaattactaagcacgtggctcaaatactcgacagcaggatgaacacaaagtacgacgagaacgacaagctcattagagaggttaaggttattactctgaaaagtaaattggttagcgatttcagaaaggatttccaattctataaggttagagagatcaacaattatcatcatgcacatgatgcctatctgaatgctgtggttggtacagcccttatcaagaagtaccctaagctagagagcgagtttgtgtacggagattataaggtgtatgatgtgaggaaaatgatcgctaaaagtgagcaagagattggaaaggctaccgccaaatacttcttttattccaatattatgaatttcttcaagacagaaatcaccctggctaacggcgagataaggaagaggccgcttatcgaaactaatggggagacaggcgaaatagtgtgggacaaagggagggatttcgcaactgtgaggaaggttttgagcatgcctcaggtgaatatcgttaagaaaaccgaagttcaaactggagggttctctaaggaaagcattctccccaagaggaactccgacaagctgattgctagaaagaaagactgggaccccaagaagtatggcggattcgactcacccactgtggcatatagcgttctcgtggtggcaaaggttgaaaagggtaaatccaaaaaactcaaatccgtgaaggaactccttggcataactattatggaaaggagtagctttgaaaagaatcccatcgactttctcgaagctaagggctataaggaagttaagaaggaccttataatcaaacttccaaaatactccctttttgagttggaaaacggcagaaagagaatgttggccagtgccggggagcttcaaaagggcaacgaactggctctgcctagcaaatatgtgaactttttgtatctggcatcacactacgagaaacttaaaggctctcctgaggacaacgagcaaaaacagctctttgttgaacagcataagcactacctcgacgagattattgagcagatcagcgagttctcaaagagagttattctggctgacgctaatcttgacaaggttttgtccgcttacaacaaacacagggataagccaatcagggagcaggcagaaaacataatccatctctttaccctgacaaacctcggtgcccccgctgctttcaagtattttgatactaccattgacaggaagagatatacttccactaaggaagtgctcgacgcaaccctcatacaccaaagtatcacaggcctctatgaaactaggatagatttgtctcaacttgggggcgat

SEQ ID NO: 76 - DNA, 4101 bp, Synthetic construct
  source 1..4101: mol_type = other DNA
gacaaaaagtattccatcgggcttgctatcggaaccaactctgtggggtgggcagttattaccgacgaatacaaggtgcccagcaagaagtttaaggttctggggaacacagatagacatagcataaagaaaaacctgataggcgcactgttgttcgactccggggaaacagccgaagctaccaggctgaagagaactgcaagaagaaggtacaccagaagaaaaaacagaatatgttatctccaagagattttctctaacgagatggccaaggtggacgactcattctttcacagactggaagaatctttccttgtggaagaagataagaaacacgagaggcaccctatttttggcaatatcgtggatgaggtggcttaccacgaaaaataccctacaatataccacctcaggaaaaaattggttgatagtacagacaaggccgacctcaggctcatctatttggccctggcccatatgattaaattcagggggcactttctcatcgagggagatttgaaccccgacaacagtgatgttgataagctctttattcagctcgtgcagacttacaatcagttgtttgaggaaaaccccattaatgcttccggggtggacgccaaggcaatcctttctgcaagactctcaaagtcaaggagactcgaaaatctgatagcacagcttccaggagagaagaagaacgggctctttggaaacctgatcgctctgtcactcggactcacacccaatttcaaaagcaattttgatttggcagaggacgctaagctgcaactcagtaaggatacctacgacgatgacttggataatctgctcgcacaaattggggaccagtatgcagacctgtttctcgcagctaagaacttgagtgacgccatattgctcagtgacatcctcagggttaataccgagattacaaaagctccactctctgcaagcatgatcaagaggtatgacgagcaccatcaagacctgacactccttaaggcgttggttaggcagcaacttcctgaaaagtataaggaaatcttcttcgatcaaagcaaaaacggctacgccggctatatagacgggggagcatcccaagaagaattttataagttcataaaacctatattggagaagatggacgggacagaggaattgctcgtgaaactgaacagggaggatctcctcaggaagcaaaggaccttcgacaatggctccatcccacatcagattcacctcggcgaactgcacgcaatactgagaagacaagaggacttttatcctttcctgaaggacaacagggagaaaatcgagaaaatcttgacattcagaatcccatactacgttgggcctctggccagaggtaacagtaggttcgcctggatgactaggaaatcagaggagactattacaccctggaactttgaagaagttgttgataagggagcttcagcacaatcattcatcgaaagaatgacaaactttgacaaaaatctgcctaatgagaaagtgctcccaaaacattccctgctgtatgagtattttaccgtttataacgagcttaccaaggtgaaatacgttactgaaggtatgagaaagccagcttttctttcaggggagcaaaagaaggctatcgtggatcttctctttaagaccaacagaaaggttaccgtgaagcagcttaaggaagactactttaaaaagatcgagtgttttgactcagtggaaataagcggtgttgaagatagattcaacgcatccttgggaacttatcatgatcttcttaagataatcaaggataaagactttctcgacaacgaggaaaacgaagatatactggaggacatagttctgacacttactttgttcgaggatagggagatgatcgaggaaagactgaaaacatatgctcaccttttcgacgacaaagttatgaaacaactcaagagaaggagatatacagggtgggggagattgagcaggaaactgattaatggtatcagagacaaacagtcaggaaaaacaatactcgactttttgaaatcagacgggttcgcaaataggaatttcatgcagcttatacacgacgattcacttacttttaaagaggacattcaaaaggctcaagttagtggacaaggtgactccctccacgaacacatcgcaaatctcgctggcagccctgcaattaagaagggtatactccagacagttaaggttgttgacgagctggttaaagtgatgggaagacacaaacccgagaacatagtgatagagatggccagggaaaaccaaaccactcaaaaagggcagaaaaattccagagagaggatgaaaaggattgaagaaggtatcaaggagctgggtagccaaattctgaaagaacatcctgtggaaaacactcaactccagaatgagaaactctatctgtactatctgcaaaatgggagagatatgtatgtggaccaggaactggacataaacaggctctcagattacgatgtggatcatatcgtgccacagtcctttcttaaggatgatagcatcgacaataaggtgcttaccaggtccgacaagaacaggggaaagtcagataacgtgccttctgaagaagttgttaaaaagatgaagaactactggagacagctgcttaacgctaagctcataacacagaggaagtttgacaacttgaccaaggccgagagaggcggactctcagaattggataaggcagggttcataaaaaggcagctggtggaaacaaggcagataactaaacatgtggctcagatcctcgatagtaggatgaatacaaaatacgatgagaacgacaagctcataagggaggttaaagtgataactctgaaatccaaactggttagcgattttaggaaggatttccagttttacaaagttagggagatcaacaattatcatcacgcccacgatgcctacttgaacgcagttgtgggtactgcacttatcaaaaagtaccctaagctggaatccgagtttgtttatggagactataaggtgtacgacgttagaaaaatgattgcaaagtcagagcaggagatagggaaagccactgcaaaatatttcttttatagcaatatcatgaatttctttaagacagaaatcacactggccaatggggaaataaggaagaggcccctgatcgaaactaatggcgagacaggggagattgtgtgggataaaggtagggactttgcaacagtgaggaaagtgctgagcatgccccaagttaatatcgttaaaaagaccgaggttcaaacagggggctttagtaaggaaagcattttgcccaagaggaatagtgacaaattgattgctaggaaaaaagattgggaccccaaaaagtatggcggatttgatagccccactgttgcttactccgtgctcgtggttgcaaaggtggagaagggaaagagcaagaaactgaagtcagttaaggaactccttggtatcactatcatggaaagaagctcctttgagaagaaccctattgacttcctggaggctaaagggtacaaagaggttaagaaagaccttatcattaaattgcccaaatatagtcttttcgagcttgaaaacggaagaaagaggatgcttgcatccgctggcgaattgcaaaagggcaatgagcttgctctcccttccaagtatgtgaacttcctttatcttgcctcacactatgaaaaactcaaaggttcacccgaagacaacgaacaaaagcaactatttgtggaacaacacaagcactacctggacgaaatcattgagcaaatttctgagttttcaaaaagggtaatcttggctgacgcaaatctcgacaaagttttgtcagcttacaacaaacatagagataagccaattagagagcaagctgagaatatcatccatctgtttaccctgactaaccttggagcgcctgctgcttttaaatatttcgacaccacaatcgacaggaagaggtacactagcactaaggaagttctcgacgccaccctcatccaccagagtattacaggcctgtacgagacaagaattgatctttctcaacttggtggtgac

SEQ ID NO: 77 - DNA, 4101 bp, Synthetic construct
  source 1..4101: mol_type = other DNA
gataagaagtactcaatcggtctggcaatcggaaccaactctgtgggttgggcagtgattacagatgagtataaggtgccaagcaaaaaattcaaggtgctgggtaataccgacagacacagcattaagaagaatttgattggagcactcctctttgactcaggggaaacagcagaggcaacaaggctgaagaggacagcaaggcggaggtacacaaggcggaaaaacaggatatgctacctccaggaaatctttagcaacgagatggctaaagtggatgatagctttttccatagactcgaagaatcctttcttgttgaagaggacaaaaagcatgaaaggcatcccatcttcggcaatatagttgatgaggttgcataccatgagaagtaccccacaatctaccacctcagaaagaaacttgtggactccacagataaagcagacctgaggctcatatacctcgcactcgcacacatgatcaagttcagagggcactttctcatcgaaggtgacctgaatccagataattcagatgtggataaactgtttatacagctggtgcaaacatacaaccaacttttcgaggaaaacccaatcaatgcctccggtgttgatgcaaaggccatcctgtcagcaagactcagcaaaagcaggcggctcgaaaacctcatcgcccagcttcccggtgaaaagaagaacgggctctttggtaatctcatcgcattgagccttggtcttactccaaacttcaagagcaattttgatctggcagaggatgctaaactgcaactctcaaaggacacatatgacgatgaccttgacaatctgttggcccagatcggggaccaatatgcagacctcttcctggccgcaaagaatctgtcagatgcaatcctcttgtccgacatactgagagttaacactgagatcacaaaggcacctctgtccgcctccatgattaagagatacgatgagcatcaccaggatctgactttgctcaaagccctcgttagacagcagttgccagaaaagtacaaagaaatattctttgatcaatcaaaaaacggatatgcagggtacatcgacggtggggcaagccaggaagagttctacaaattcatcaaacctatcctggaaaagatggatgggacagaagagctgctggttaagctgaatagggaagacctcctcagaaagcagaggacatttgataacgggagcatccctcatcaaatccacctcggtgaactccatgctatcctgagaaggcaggaagacttttatccatttttgaaggacaatagggagaaaatcgaaaaaatcctgacattcagaatcccatactacgttggtcctctggcaagaggtaacagtaggttcgcatggatgacaaggaaaagcgaggagacaatcacaccctggaattttgaggaagttgttgacaagggtgccagcgcacaatcctttatcgaaagaatgacaaatttcgacaagaatctgcctaacgaaaaggttctcccaaagcattcactcctgtacgaatattttacagtttataacgaactgactaaagttaaatacgttaccgagggtatgaggaagccagcattcctttccggggaacagaagaaagctattgtggacctcctgttcaagacaaatagaaaagtgacagttaagcaactcaaagaggattacttcaaaaagatcgaatgttttgactctgtggagatcagcggggtggaggatagattcaacgccagcctgggtacatatcatgatctcctgaaaatcattaaagacaaggacttccttgacaacgaggagaacgaggacattctggaagacattgttctgaccctcacactctttgaggatagggagatgattgaggaaagactgaagacctacgcccacctctttgacgataaagtgatgaaacagctcaagagaagaaggtatacaggttgggggagactgagcaggaagttgatcaatgggattagggacaaacagtccgggaaaacaatcctcgattttctgaagtcagacggtttcgcaaacagaaattttatgcagctcattcacgatgacagcttgacattcaaggaagacatccaaaaggctcaagtgagcggccaaggggatagcctccacgagcatattgcaaatctggcaggttcaccagccatcaaaaagggcatacttcagacagttaaggttgtggacgaattggttaaagttatgggcaggcataagccagagaatatcgttatcgaaatggcaagggagaaccaaacaactcaaaaagggcagaaaaatagcagagagaggatgaaaagaatcgaggaagggatcaaggaacttgggtcccaaatcctcaaggagcacccagttgaaaatactcaactgcaaaacgagaagctctatctctactatctccaaaacgggagggatatgtatgttgaccaggagctggatattaacagactgtcagattatgatgttgatcatatcgtgccccagtcattcctgaaggacgattccatcgacaacaaagttctcacaaggtccgataaaaacaggggcaagtccgataacgttccaagcgaagaagtggtgaaaaagatgaaaaactattggagacaacttctgaatgcaaagttgattactcagagaaagtttgacaacctcacaaaagcagaaagaggcgggcttagcgaactcgataaggcagggtttatcaaaagacagctggttgagacaaggcagatcacaaaacatgtggcacagatccttgactcaaggatgaataccaagtatgatgagaatgataagttgatcagggaggttaaagttatcacactcaaatccaaactggtgtcagacttcaggaaagactttcaattttataaggtgagggagatcaataactaccaccatgcacatgacgcctacctgaacgcagtggtgggtacagcattgattaaaaaataccctaagctggagtctgagtttgtgtacggggactacaaggtgtacgacgtgaggaaaatgatagccaagtccgagcaggagatcgggaaagcaacagctaagtatttcttttacagtaatatcatgaatttctttaaaactgagattactctggcaaacggggagatcaggaaaagacccctcatcgagactaatggtgaaacaggtgagatcgtttgggacaaggggagggattttgctactgttagaaaagttctgagtatgccacaagtgaatattgtgaaaaagacagaagttcagacaggtgggttctccaaagaatccatcctgcccaagagaaattcagacaagctcatcgcaagaaagaaggactgggaccctaagaagtacggaggatttgacagccccaccgtggcctattccgtgcttgttgtggcaaaggtggagaaagggaagagcaaaaaactgaaatccgtgaaagaactgctgggaattaccatcatggaaagaagctcctttgagaagaacccaatcgacttcctggaagcaaaaggatataaggaagtgaaaaaggacctcattatcaagctcccaaaatactcacttttcgagttggagaacggtagaaagaggatgctggcaagcgcaggggaacttcagaaaggcaatgagctggcattgccatcaaagtatgtgaacttcctctacttggccagccattacgagaaacttaaaggtagcccagaagataacgagcaaaaacagctctttgtggaacagcataagcattatctggatgagatcatagaacaaatctcagagttttccaagagagttatcctcgcagatgcaaacctggataaggttctctcagcctataataagcatagagacaagccaattagagagcaagcagagaacattatccacttgttcactcttacaaacctgggggcaccagccgccttcaaatatttcgatacaacaatagacagaaagaggtataccagcaccaaagaagttctcgacgccacactgatccatcaatcaatcacaggcctttacgaaactaggatcgacttgtcacaactgggtggggat

SEQ ID NO: 78 - DNA, 3307 bp, Synthetic construct
  source 1..3307: mol_type = other DNA
gagcaaggacacctacgacgacgacttggacaacctattggcccagataggtgaccagtatgcagacctcttccttgcggccaagaacttgagtgacgctatactgctcagtgacatcctgagggtgaacactgagatcactaaggcccctctctctgcctcaatgattaagcgttacgacgagcatcaccaggatctcaccctgcttaaggcccttgttcggcagcagctccctgagaagtacaaggagatattttttgaccagtctaagaacggctacgccggttacattgacggtggggcaagccaggaggagttctacaagttcatcaagccgatccttgagaagatggacggcaccgaggagctacttgtcaagttgaaccgggaagacctgctccggaaacagcgtacattcgacaacggcagcatccctcaccagatccacctgggcgaactacacgccatcctccgacgtcaggaggacttctatccattcttgaaagataacagggaaaaaatcgaaaaaatacttacgtttcgaataccttactacgtggggccccttgctcggggaaactccagattcgcatggatgaccaggaagtcagaggagaccatcacaccctggaactttgaggaggtggttgacaaaggtgcttctgcccagtccttcattgagcggatgactaacttcgacaagaacctgcccaacgagaaggtgctgccaaagcacagcctgctctacgaatactttactgtgtacaatgagctgacgaaggtgaagtacgtgacagaggggatgcggaagcccgctttcctgagcggcgagcaaaaaaaagcaatcgtggacctactgttcaagaccaaccgaaaggtgacagtgaagcagctcaaggaggactacttcaaaaaaatcgagtgcttcgactctgttgagataagcggcgtggaggaccgattcaacgcctcattgggaacctatcacgacctgctcaagatcattaaggacaaggacttcctggataatgaggagaatgaggacatcctggaggatattgtgctgacccttactctattcgaggacagggagatgatcgaggagcgactcaagacctacgctcacctgttcgacgacaaggttatgaagcaattgaagcgtaggcgatacacggggtggggaagactctcccgaaaactgataaacggcatcagggacaagcagtcagggaagacgatcttggacttcctgaaatccgacgggttcgccaaccgcaacttcatgcagctcattcacgacgactcactaacgttcaaagaggacattcagaaggctcaagtcagtggacaaggcgactccctgcacgagcacattgcaaaccttgcgggctccccggcgattaaaaagggcattctccaaacggttaaggtggtggacgagctggtgaaggtgatgggccgacacaagcctgagaacatcgtgatcgagatggccagggagaaccagactacccagaagggtcagaagaactctcgggaacgtatgaagcgtattgaggaggggattaaggagttgggctctcaaatcctcaaggagcaccctgtggagaacactcagctccaaaacgagaagctgtacctgtactacctgcaaaacgggcgcgatatgtacgtggatcaggagttggacatcaacaggcttagcgattacgacgtggaccacatcgtgccacagtcattcttaaaggacgacagcatcgacaacaaggttctgacgaggagcgacaagaatcgagggaaaagtgacaatgttccatccgaggaggtggtcaagaaaatgaagaactattggcgtcagcttctgaacgccaagctcatcacccagcggaaattcgacaacctgactaaggctgagcgaggcggactctccgagcttgacaaggctggcttcatcaagcggcagttggtcgaaacccgacagataacgaagcacgttgcccagatacttgactcccgtatgaacaccaagtacgacgagaacgacaagctcatcagggaggtgaaggtcattacccttaagtccaaactcgtcagcgactttcgtaaggacttccagttctacaaggtgcgcgagatcaataactaccaccacgcacacgacgcctacctgaacgcagtggttggaaccgcgttgattaaaaagtaccccaagttggagtcggagttcgtttacggggactacaaggtgtacgacgttcggaagatgatcgccaagtctgaacaggagatcgggaaagcaaccgccaagtatttcttctatagcaacatcatgaacttctttaaaaccgagatcacacttgccaatggcgagatccgtaagaggccgctgatcgagacaaatggggagactggcgagatcgtgtgggacaagggccgcgacttcgcaaccgttcggaaagtcttgtccatgcctcaagtcaacatcgtcaagaagactgaggtgcaaacaggcgggttctcgaaggagtccatactgcccaagaggaactcagacaagctcatagcacgcaaaaaagactgggatccaaagaaatacggcgggttcgactcgccgacagtcgcatactccgtgttagtggtggctaaagtggaaaaggggaagtccaagaagctcaagtccgtcaaggagttgctcgggatcaccattatggaacggtcctcattcgagaagaatcccattgacttcctagaggcgaagggctacaaagaggtcaaaaaggacctaattattaagctccccaagtattcactcttcgaacttgaaaatggtcgtaagcggatgttggcaagcgctggagagcttcagaaggggaacgagcttgcactgccttccaagtacgtgaacttcctgtacctcgcctctcattacgagaagttgaagggctcaccggaggacaacgagcagaagcagttgttcgtggagcagcacaagcactacctcgacgagatcattgagcagataagtgagttcagcaaacgggtgatccttgccgacgctaacctggacaaggtgctgagcgcctacaacaagcacagagacaagccgatccgagagcaagcggagaacatcatacacctgttcaccctcacgaacctcggggctcccgcagccttcaaatattttgacacgaccatcgaccgtaaacgctacactagcacgaaggaggtgctggacgctacccttatccaccagtccatcaccggcctgtacgagacgagaatcgacttgtcgcagctcggtggtgac

SEQ ID NO: 79 - DNA, 4101 bp, Synthetic construct
  source 1..4101: mol_type = other DNA
gacaaaaaatactcaattggtctggcaattgggaccaacagtgtcggatgggccgtgattaccgacgagtacaaggtgccgtccaaaaaattcaaggtgcttgggaacaccgaccgccactcgatcaagaaaaacctaatcggtgcgttgcttttcgacagtggggagaccgccgaggcaacacgcttaaaacgcacagctaggaggagatatacacggcgcaagaaccgaatatgctacttacaggagatattctccaatgagatggcgaaggtggacgactctttcttccatcggcttgaggaatccttcctggtcgaggaggacaagaagcacgagcgacacccgatattcgggaacatcgttgatgaggtggcgtaccacgagaagtacccaacgatataccacttacgcaagaagctcgtggactctacggacaaggccgacttgcgccttatctacttggcactggcccacatgattaagttccgaggccacttccttatcgagggtgacctgaaccccgataactccgacgtggacaagctcttcatccaactcgtccagacatacaaccagctattcgaggagaatcctatcaacgcctctggggtggacgctaaagctatcctctcagcccgcctgtcaaagtcgaggaggttggagaacctaatcgcccagcttccaggcgagaagaaaaatgggctgttcggaaaccttatcgcactctcactgggcctaaccccgaacttcaagtccaacttcgacctggcagaggacgcgaaattgcagttgtcgaaagacacctatgacgatgacctggacaacctgttggcccagataggggaccagtacgccgacctgttcctagcggccaagaacctgtccgacgccatcttgctgtcggatatactgcgggtgaacaccgagatcactaaagcacctctctccgccagcatgattaagcgttacgacgagcaccaccaagatttgaccctgctaaaggcacttgtacggcagcagcttcccgagaagtacaaggagatctttttcgaccaaagcaagaacggctacgccgggtacatcgacggaggtgccagccaggaggagttctacaagttcattaagcccatcctggagaagatggacgggactgaggaactacttgtgaagctgaaccgggaagacttactacggaagcagcgtaccttcgacaacggttctatcccacatcagatccatcttggggagttgcacgcgatcctgcgacgccaggaggacttttaccccttcctgaaagacaaccgcgagaaaatcgagaagatactgaccttcagaataccttactacgtcggaccccttgcgcgaggcaactcaagattcgcgtggatgaccaggaaatcagaggagaccatcacaccctggaatttcgaggaggtggttgacaagggtgcctccgcccagtcctttatcgaacgaatgaccaacttcgacaagaacttgcccaacgagaaggtgctccccaaacacagcctcctctacgaatatttcacagtgtacaacgagcttactaaagttaagtatgttactgagggcatgaggaaacccgccttcctgtcaggcgagcagaagaaagctattgtggacctccttttcaagaccaaccggaaggtgacagtgaagcagctcaaggaggactacttcaagaagatagagtgcttcgacagcgtggagatcagcggggtggaggacagattcaatgcctctctcggaacataccacgacttgcttaagatcatcaaggacaaggacttcctcgacaacgaggaaaacgaggatattctggaggatattgttctgactcttaccctgttcgaggaccgggagatgatcgaggagcgtctcaagacctacgcccacctgttcgacgacaaagttatgaagcagctcaagcgtcggagatataccggatggggccgtctgtctcggaagctcatcaacgggatcagggacaagcagtcagggaagacgatcttagacttccttaagtctgacggcttcgccaacaggaacttcatgcagttgatccacgacgacagccttaccttcaaggaggacatccagaaggcccaagtgagtggccagggtgacagcctccacgagcatattgctaatcttgcgggttccccagcgattaaaaagggcatacttcaaaccgttaaggtggtggacgagcttgtcaaggtgatggggcgacacaagcccgagaacatcgtgatcgagatggccagggagaaccagaccacccagaaggggcagaagaatagccgagaacgcatgaagcgcatcgaggaggggattaaggagctagggagccagatcctcaaggaacatcccgtcgagaacacccagctccagaacgagaagctatacctctactacttgcaaaacgggagggatatgtacgtggatcaggagttggacattaaccgcctaagcgactacgacgtagatcacatcgtgcctcagtcattcctcaaagacgacagcattgacaacaaagtcttgacccgatccgacaagaaccgaggaaaatccgacaatgtgccctcagaggaggtcgtcaagaaaatgaagaactattggaggcagctacttaacgccaaactcataacccagcggaagttcgacaacctgacaaaggctgagcggggtgggctcagcgagcttgacaaggctggcttcatcaagcggcagttggtggagacaagacagataacgaagcacgtggctcagatcctggactctcgcatgaacacgaagtacgacgagaacgacaaattgatccgcgaggtcaaggttattacgctcaagagcaaacttgtcagcgatttccgcaaggacttccagttctacaaggtgagggagattaacaactaccaccatgcacatgatgcctacttgaacgcagtggtggggaccgcgcttattaaaaagtaccctaagttggagtcagagttcgtttatggggactacaaggtgtacgacgtccggaagatgattgcaaagtctgaacaggaaatcgggaaggccaccgccaaatatttcttctacagtaacattatgaatttttttaagactgaaattactctcgcaaacggcgagatcaggaagcgtcccctcatcgagacaaacggggagaccggggagatagtctgggacaaggggcgggacttcgctacggtgaggaaggtgctctcgatgccacaagtgaacatcgtcaaaaagacagaggtgcagaccggtggcttctcaaaggagtcaatcctgccaaaacgtaacagcgacaagctcatcgcccgcaagaaagactgggaccctaagaagtatggtgggttcgactcaccgacggtcgcatactccgttctggtcgtggcaaaggtggaaaagggcaagtccaaaaaactgaaatccgtgaaggagttgcttggcattaccatcatggaacgcagcagcttcgagaagaaccccattgacttcctggaggctaaagggtacaaggaggtcaagaaagatttaattattaagctacctaagtacagcttgttcgagctggagaacggccgaaaacgaatgctcgcatccgccggggaacttcaaaagggcaacgagcttgcgctgccctccaagtacgtgaacttcctgtacttggcatcccactacgagaaactcaagggtagcccagaggacaacgagcagaagcagctattcgtggagcagcacaagcactacctcgacgagataatcgagcagatcagtgagttcagtaagcgggtgatactcgcggacgccaacttggacaaggtgcttagtgcctacaacaagcaccgtgacaagcccatccgagaacaggctgagaacatcatccaccttttcactctgacaaacctcggtgctcccgccgccttcaaatacttcgacactaccatcgacaggaagcgctacacatctacgaaggaagttcttgacgctacgcttattcatcagtctatcacagggctgtacgagacaaggatcgaccttagccaactcggcggggat

SEQ ID NO: 80 - DNA, 4101 bp, Synthetic construct
  source 1..4101: mol_type = other DNA
gacaagaagtacagcatcgggctggcgatcgggaccaactccgtcggctgggctgtgattaccgacgagtacaaggtgccatccaagaagttcaaggtcctcggcaacactgaccggcacagcattaagaagaacctgattggggcgctgctgttcgattcgggggagactgcggaggcgaccaggctgaagcggactgcgcgccggaggtacaccaggaggaagaatcggatctgctacctccaggagattttctcgaatgagatggccaaggtggacgattccttcttccatcgcctggaggagtcgttcctcgttgaggaggacaagaagcatgagaggcatcccattttcgggaatatcgttgacgaggtggcttaccatgagaagtacccgaccatctaccatctgcggaagaagctcgtcgattcgaccgataaggccgacctgcggctgatctacctggccctcgcgcacatgattaagttccggggccatttcctcatcgagggcgacctcaacccggacaactcggacgtggataagctcttcattcagctcgtgcagacatacaaccagctcttcgaggagaatcccattaacgcctcgggggtcgacgctaaggctattctctcggctcggctgtcgaagtcgcgccggctggagaatctcattgcccagctcccaggcgagaagaagaacggcctcttcggcaacctgattgccctgtcgctggggctcacaccgaatttcaagtcgaacttcgacctcgccgaggacgctaagctccagctcagcaaggatacttacgatgatgacctcgataacctgctcgcccagattggggatcagtacgcggatctgttcctcgcggccaagaatctcagcgatgctattctcctgtcggacattctccgcgtcaacacagagattactaaggccccactgtcggcgagcatgattaagaggtacgatgagcatcatcaggacctgacactgctcaaggcgctggtccggcagcagctccccgagaagtacaaggagattttcttcgatcagtcaaagaatgggtacgcgggctacattgatggcggcgcgtcccaggaggagttctacaagttcattaagcccatcctggagaagatggacgggaccgaggagctgctggtgaagctcaatcgggaggacctgctccggaagcagcgcacattcgacaatggctcgattcctcaccagattcacctgggcgagctgcacgccattctccgcaggcaggaggacttctacccgttcctcaaggacaaccgcgagaagatcgagaagatcctgaccttccggattccatactacgtggggccgctcgcgcgggggaactcccggttcgcgtggatgactcgcaagtccgaagaaacgattacaccgtggaatttcgaggaggtcgtcgacaagggcgctagtgcgcagtcattcattgagaggatgaccaatttcgataagaacctgcctaacgagaaggtgctgccgaagcattcgctgctctacgagtacttcaccgtttacaatgagctgaccaaggtgaagtatgtgactgagggcatgaggaagccagcgttcctgagcggcgagcagaagaaggctatcgtggacctgctcttcaagactaaccggaaggtgactgtgaagcagctcaaggaggactacttcaagaagattgagtgcttcgattccgttgagattagcggggtggaggatcggttcaatgcttcgctcgggacataccacgatctcctgaagatcattaaggataaggacttcctcgacaacgaggagaacgaggacattctcgaagatattgtcctgaccctcaccctcttcgaggatcgggagatgatcgaggagaggctcaagacatacgctcatctgttcgatgataaggtcatgaagcagctgaagcgcaggcggtacacagggtgggggcggctgagccggaagctgatcaacgggattcgggataagcagtccgggaagacaattctcgacttcctcaagtccgacgggttcgctaaccggaacttcatgcagctcattcatgatgactcgctgacattcaaggaggatattcagaaggcgcaggtttcggggcagggcgactcgctccacgagcatattgcgaatctggcgggctcccccgcgattaagaagggcattctgcaaaccgtcaaggtggttgatgagctggtcaaggtcatggggcggcataagccagagaatattgtcatcgagatggcgcgggagaatcagaccacacagaaggggcagaagaactcacgggagcggatgaagcgcatcgaggagggcatcaaggagctggggtcgcagatcctgaaggagcatcccgtggagaacactcagctgcaaaatgagaagctgtacctctactacctccagaacgggagggacatgtatgtggatcaggagctggatattaataggctgagcgattacgatgtcgaccacattgtcccacagtcgttcctgaaggacgacagcattgacaacaaggtgctgacccgctcggataagaacaggggcaagagcgataatgttccaagcgaggaggttgtgaagaagatgaagaactactggcggcagctcctgaacgcgaagctcatcacacagcggaagttcgacaacctcaccaaggctgagcgcgggggcctgagcgagctggacaaggcggggttcattaagaggcagctggtcgagacacggcagattacaaagcatgttgcgcagattctcgattcccggatgaacaccaagtacgatgagaacgataagctgattcgggaggtcaaggtaattaccctgaagtccaagctggtgtccgacttcaggaaggacttccagttctacaaggttcgggagatcaacaactaccaccacgcgcatgatgcctacctcaacgcggtcgtggggaccgctctcatcaagaagtacccaaagctggagtcagagttcgtctacggggattacaaggtttacgacgtgcggaagatgatcgctaagagcgagcaggagattggcaaggctaccgctaagtacttcttctactccaacatcatgaacttcttcaagacagagattaccctcgcgaatggcgagatccggaagaggcccctcatcgagacaaatggggagacaggggagattgtctgggataaggggcgggatttcgcgaccgtccggaaggtcctgtcgatgccccaggttaatattgtcaagaagactgaggtccagactggcggcttctcaaaggagtcgattctcccaaagaggaactccgataagctcattgctcggaagaaggattgggaccccaagaagtacgggggattcgactcccccactgttgcttactctgttctggttgttgctaaggtggagaaggggaagtcgaagaagctgaagagcgtgaaggagctgctcgggattacaattatggagaggtcatccttcgagaagaatcccatcgacttcctggaggccaagggctacaaggaggtgaagaaggacctgattattaagctgcccaagtactcgctcttcgagctggagaatgggcggaagcggatgctggcgtccgcgggggagctgcaaaaggggaacgagctggcgctcccctccaagtatgtgaacttcctctacctggcgtcgcactacgagaagctgaaggggtccccagaggataatgagcagaagcagctcttcgtcgagcagcataagcactacctggacgagattatcgagcagattagcgagttctcgaagcgggtcatcctcgcggatgcgaacctggataaggtgctcagcgcctacaataagcaccgggacaagccgattcgggagcaggcggagaatattattcacctcttcacactcaccaacctcggggcaccagctgcgttcaagtacttcgacactactatcgaccggaagcggtacacctcgacgaaggaggtgctcgacgccaccctcattcaccagtcgatcacaggcctgtacgagacacggattgacctgtcccagctcgggggcgac

SEQ ID NO: 81 - DNA, 4101 bp, Synthetic construct
  source 1..4101: mol_type = other DNA
gacaagaagtacagcatcggcctggacatcggcaccaactctgtgggctgggccgtgatcaccgacgagtacaaggtgcccagcaagaaattcaaggtgctgggcaacaccgaccggcacagcatcaagaagaacctgatcggagccctgctgttcgacagcggcgaaacagccgaggccacccggctgaagagaaccgccagaagaagatacaccagacggaagaaccggatctgctatctgcaagagatcttcagcaacgagatggccaaggtggacgacagcttcttccacagactggaagagtccttcctggtggaagaggataagaagcacgagcggcaccccatcttcggcaacatcgtggacgaggtggcctaccacgagaagtaccccaccatctaccacctgagaaagaaactggtggacagcaccgacaaggccgacctgcggctgatctatctggccctggcccacatgatcaagttccggggccacttcctgatcgagggcgacctgaaccccgacaacagcgacgtggacaagctgttcatccagctggtgcagacctacaaccagctgttcgaggaaaaccccatcaacgccagcggcgtggacgccaaggccatcctgtctgccagactgagcaagagcagacggctggaaaatctgatcgcccagctgcccggcgagaagaagaatggcctgttcggaaacctgattgccctgagcctgggcctgacccccaacttcaagagcaacttcgacctggccgaggatgccaaactgcagctgagcaaggacacctacgacgacgacctggacaacctgctggcccagatcggcgaccagtacgccgacctgtttctggccgccaagaacctgtccgacgccatcctgctgagcgacatcctgagagtgaacaccgagatcaccaaggcccccctgagcgcctctatgatcaagagatacgacgagcaccaccaggacctgaccctgctgaaagctctcgtgcggcagcagctgcctgagaagtacaaagagattttcttcgaccagagcaagaacggctacgccggctacattgacggcggagccagccaggaagagttctacaagttcatcaagcccatcctggaaaagatggacggcaccgaggaactgctcgtgaagctgaacagagaggacctgctgcggaagcagcggaccttcgacaacggcagcatcccccaccagatccacctgggagagctgcacgccattctgcggcggcaggaagatttttacccattcctgaaggacaaccgggaaaagatcgagaagatcctgaccttccgcatcccctactacgtgggccctctggccaggggaaacagcagattcgcctggatgaccagaaagagcgaggaaaccatcaccccctggaacttcgaggaagtggtggacaagggcgcttccgcccagagcttcatcgagcggatgaccaacttcgataagaacctgcccaacgagaaggtgctgcccaagcacagcctgctgtacgagtacttcaccgtgtataacgagctgaccaaagtgaaatacgtgaccgagggaatgagaaagcccgccttcctgagcggcgagcagaaaaaggccatcgtggacctgctgttcaagaccaaccggaaagtgaccgtgaagcagctgaaagaggactacttcaagaaaatcgagtgcttcgactccgtggaaatctccggcgtggaagatcggttcaacgcctccctgggcacataccacgatctgctgaaaattatcaaggacaaggacttcctggacaatgaggaaaacgaggacattctggaagatatcgtgctgaccctgacactgtttgaggacagagagatgatcgaggaacggctgaaaacctatgcccacctgttcgacgacaaagtgatgaagcagctgaagcggcggagatacaccggctggggcaggctgagccggaagctgatcaacggcatccgggacaagcagtccggcaagacaatcctggatttcctgaagtccgacggcttcgccaacagaaacttcatgcagctgatccacgacgacagcctgacctttaaagaggacatccagaaagcccaggtgtccggccagggcgatagcctgcacgagcacattgccaatctggccggcagccccgccattaagaagggcatcctgcagacagtgaaggtggtggacgagctcgtgaaagtgatgggccggcacaagcccgagaacatcgtgatcgaaatggccagagagaaccagaccacccagaagggacagaagaacagccgcgagagaatgaagcggatcgaagagggcatcaaagagctgggcagccagatcctgaaagaacaccccgtggaaaacacccagctgcagaacgagaagctgtacctgtactacctgcagaatgggcgggatatgtacgtggaccaggaactggacatcaaccggctgtccgactacgatgtggaccatatcgtgcctcagagctttctgaaggacgactccatcgacaacaaggtgctgaccagaagcgacaagaaccggggcaagagcgacaacgtgccctccgaagaggtcgtgaagaagatgaagaactactggcggcagctgctgaacgccaagctgattacccagagaaagttcgacaatctgaccaaggccgagagaggcggcctgagcgaactggataaggccggcttcatcaagagacagctggtggaaacccggcagatcacaaagcacgtggcacagatcctggactcccggatgaacactaagtacgacgagaatgacaagctgatccgggaagtgaaagtgatcaccctgaagtccaagctggtgtccgatttccggaaggatttccagttttacaaagtgcgcgagatcaacaactaccaccacgcccacgacgcctacctgaacgccgtcgtgggaaccgccctgatcaaaaagtaccctaagctggaaagcgagttcgtgtacggcgactacaaggtgtacgacgtgcggaagatgatcgccaagagcgagcaggaaatcggcaaggctaccgccaagtacttcttctacagcaacatcatgaactttttcaagaccgagattaccctggccaacggcgagatccggaagcggcctctgatcgagacaaacggcgaaaccggggagatcgtgtgggataagggccgggattttgccaccgtgcggaaagtgctgagcatgccccaagtgaatatcgtgaaaaagaccgaggtgcagacaggcggcttcagcaaagagtctatcctgcccaagaggaacagcgataagctgatcgccagaaagaaggactgggaccctaagaagtacggcggcttcgacagccccaccgtggcctattctgtgctggtggtggccaaagtggaaaagggcaagtccaagaaactgaagagtgtgaaagagctgctggggatcaccatcatggaaagaagcagcttcgagaagaatcccatcgactttctggaagccaagggctacaaagaagtgaaaaaggacctgatcatcaagctgcctaagtactccctgttcgagctggaaaacggccggaagagaatgctggcctctgccggcgaactgcagaagggaaacgaactggccctgccctccaaatatgtgaacttcctgtacctggccagccactatgagaagctgaagggctcccccgaggataatgagcagaaacagctgtttgtggaacagcacaagcactacctggacgagatcatcgagcagatcagcgagttctccaagagagtgatcctggccgacgctaatctggacaaagtgctgtccgcctacaacaagcaccgggataagcccatcagagagcaggccgagaatatcatccacctgtttaccctgaccaatctgggagcccctgccgccttcaagtactttgacaccaccatcgaccggaagaggtacaccagcaccaaagaggtgctggacgccaccctgatccaccagagcatcaccggcctgtacgagacacggatcgacctgtctcagctgggaggtgac

SEQ ID NO: 82 - DNA, 4101 bp, Synthetic construct
  source 1..4101: mol_type = other DNA
gacaagaagtacagcatcggcctggacatcggcaccaactctgtgggctgggccgtgatcaccgacgagtacaaggtgcccagcaagaaattcaaggtgctgggcaacaccgaccggcacagcatcaagaagaacctgatcggagccctgctgttcgacagcggcgaaacagccgaggccacccggctgaagagaaccgccagaagaagatacaccagacggaagaaccggatctgctatctgcaagagatcttcagcaacgagatggccaaggtggacgacagcttcttccacagactggaagagtccttcctggtggaagaggataagaagcacgagcggcaccccatcttcggcaacatcgtggacgaggtggcctaccacgagaagtaccccaccatctaccacctgagaaagaaactggtggacagcaccgacaaggccgacctgcggctgatctatctggccctggcccacatgatcaagttccggggccacttcctgatcgagggcgacctgaaccccgacaacagcgacgtggacaagctgttcatccagctggtgcagacctacaaccagctgttcgaggaaaaccccatcaacgccagcggcgtggacgccaaggccatcctgtctgccagactgagcaagagcagacggctggaaaatctgatcgcccagctgcccggcgagaagaagaatggcctgttcggaaacctgattgccctgagcctgggcctgacccccaacttcaagagcaacttcgacctggccgaggatgccaaactgcagctgagcaaggacacctacgacgacgacctggacaacctgctggcccagatcggcgaccagtacgccgacctgtttctggccgccaagaacctgtccgacgccatcctgctgagcgacatcctgagagtgaacaccgagatcaccaaggcccccctgagcgcctctatgatcaagagatacgacgagcaccaccaggacctgaccctgctgaaagctctcgtgcggcagcagctgcctgagaagtacaaagagattttcttcgaccagagcaagaacggctacgccggctacattgacggcggagccagccaggaagagttctacaagttcatcaagcccatcctggaaaagatggacggcaccgaggaactgctcgtgaagctgaacagagaggacctgctgcggaagcagcggaccttcgacaacggcagcatcccccaccagatccacctgggagagctgcacgccattctgcggcggcaggaagatttttacccattcctgaaggacaaccgggaaaagatcgagaagatcctgaccttccgcatcccctactacgtgggccctctggccaggggaaacagcagattcgcctggatgaccagaaagagcgaggaaaccatcaccccctggaacttcgaggaagtggtggacaagggcgcttccgcccagagcttcatcgagcggatgaccaacttcgataagaacctgcccaacgagaaggtgctgcccaagcacagcctgctgtacgagtacttcaccgtgtataacgagctgaccaaagtgaaatacgtgaccgagggaatgagaaagcccgccttcctgagcggcgagcagaaaaaggccatcgtggacctgctgttcaagaccaaccggaaagtgaccgtgaagcagctgaaagaggactacttcaagaaaatcgagtgcttcgactccgtggaaatctccggcgtggaagatcggttcaacgcctccctgggcacataccacgatctgctgaaaattatcaaggacaaggacttcctggacaatgaggaaaacgaggacattctggaagatatcgtgctgaccctgacactgtttgaggacagagagatgatcgaggaacggctgaaaacctatgcccacctgttcgacgacaaagtgatgaagcagctgaagcggcggagatacaccggctggggcaggctgagccggaagctgatcaacggcatccgggacaagcagtccggcaagacaatcctggatttcctgaagtccgacggcttcgccaacagaaacttcatgcagctgatccacgacgacagcctgacctttaaagaggacatccagaaagcccaggtgtccggccagggcgatagcctgcacgagcacattgccaatctggccggcagccccgccattaagaagggcatcctgcagacagtgaaggtggtggacgagctcgtgaaagtgatgggccggcacaagcccgagaacatcgtgatcgaaatggccagagagaaccagaccacccagaagggacagaagaacagccgcgagagaatgaagcggatcgaagagggcatcaaagagctgggcagccagatcctgaaagaacaccccgtggaaaacacccagctgcagaacgagaagctgtacctgtactacctgcagaatgggcgggatatgtacgtggaccaggaactggacatcaaccggctgtccgactacgatgtggaccatatcgtgcctcagagctttctggccgacgactccatcgacaacaaggtgctgaccagaagcgacaagaaccggggcaagagcgacaacgtgccctccgaagaggtcgtgaagaagatgaagaactactggcggcagctgctgaacgccaagctgattacccagagaaagttcgacaatctgaccaaggccgagagaggcggcctgagcgaactggataaggccggcttcatcaagagacagctggtggaaacccggcagatcacaaagcacgtggcacagatcctggactcccggatgaacactaagtacgacgagaatgacaagctgatccgggaagtgaaagtgatcaccctgaagtccaagctggtgtccgatttccggaaggatttccagttttacaaagtgcgcgagatcaacaactaccaccacgcccacgacgcctacctgaacgccgtcgtgggaaccgccctgatcaaaaagtaccctgccctggaaagcgagttcgtgtacggcgactacaaggtgtacgacgtgcggaagatgatcgccaagagcgagcaggaaatcggcaaggctaccgccaagtacttcttctacagcaacatcatgaactttttcaagaccgagattaccctggccaacggcgagatccggaaggcccctctgatcgagacaaacggcgaaaccggggagatcgtgtgggataagggccgggattttgccaccgtgcggaaagtgctgagcatgccccaagtgaatatcgtgaaaaagaccgaggtgcagacaggcggcttcagcaaagagtctatcctgcccaagaggaacagcgataagctgatcgccagaaagaaggactgggaccctaagaagtacggcggcttcgacagccccaccgtggcctattctgtgctggtggtggccaaagtggaaaagggcaagtccaagaaactgaagagtgtgaaagagctgctggggatcaccatcatggaaagaagcagcttcgagaagaatcccatcgactttctggaagccaagggctacaaagaagtgaaaaaggacctgatcatcaagctgcctaagtactccctgttcgagctggaaaacggccggaagagaatgctggcctctgccggcgaactgcagaagggaaacgaactggccctgccctccaaatatgtgaacttcctgtacctggccagccactatgagaagctgaagggctcccccgaggataatgagcagaaacagctgtttgtggaacagcacaagcactacctggacgagatcatcgagcagatcagcgagttctccaagagagtgatcctggccgacgctaatctggacaaagtgctgtccgcctacaacaagcaccgggataagcccatcagagagcaggccgagaatatcatccacctgtttaccctgaccaatctgggagcccctgccgccttcaagtactttgacaccaccatcgaccggaagaggtacaccagcaccaaagaggtgctggacgccaccctgatccaccagagcatcaccggcctgtacgagacacggatcgacctgtctcagctgggaggtgac

SEQ ID NO: 83 - DNA, 4101 bp, Synthetic construct
  source 1..4101: mol_type = other DNA
gacaagaagtacagcatcggcctggccatcggcaccaactctgtgggctgggccgtgatcaccgacgagtacaaggtgcccagcaagaaattcaaggtgctgggcaacaccgaccggcacagcatcaagaagaacctgatcggagccctgctgttcgacagcggcgaaacagccgaggccacccggctgaagagaaccgccagaagaagatacaccagacggaagaaccggatctgctatctgcaagagatcttcagcaacgagatggccaaggtggacgacagcttcttccacagactggaagagtccttcctggtggaagaggataagaagcacgagcggcaccccatcttcggcaacatcgtggacgaggtggcctaccacgagaagtaccccaccatctaccacctgagaaagaaactggtggacagcaccgacaaggccgacctgcggctgatctatctggccctggcccacatgatcaagttccggggccacttcctgatcgagggcgacctgaaccccgacaacagcgacgtggacaagctgttcatccagctggtgcagacctacaaccagctgttcgaggaaaaccccatcaacgccagcggcgtggacgccaaggccatcctgtctgccagactgagcaagagcagacggctggaaaatctgatcgcccagctgcccggcgagaagaagaatggcctgttcggaaacctgattgccctgagcctgggcctgacccccaacttcaagagcaacttcgacctggccgaggatgccaaactgcagctgagcaaggacacctacgacgacgacctggacaacctgctggcccagatcggcgaccagtacgccgacctgtttctggccgccaagaacctgtccgacgccatcctgctgagcgacatcctgagagtgaacaccgagatcaccaaggcccccctgagcgcctctatgatcaagagatacgacgagcaccaccaggacctgaccctgctgaaagctctcgtgcggcagcagctgcctgagaagtacaaagagattttcttcgaccagagcaagaacggctacgccggctacattgacggcggagccagccaggaagagttctacaagttcatcaagcccatcctggaaaagatggacggcaccgaggaactgctcgtgaagctgaacagagaggacctgctgcggaagcagcggaccttcgacaacggcagcatcccccaccagatccacctgggagagctgcacgccattctgcggcggcaggaagatttttacccattcctgaaggacaaccgggaaaagatcgagaagatcctgaccttccgcatcccctactacgtgggccctctggccaggggaaacagcagattcgcctggatgaccagaaagagcgaggaaaccatcaccccctggaacttcgaggaagtggtggacaagggcgcttccgcccagagcttcatcgagcggatgaccaacttcgataagaacctgcccaacgagaaggtgctgcccaagcacagcctgctgtacgagtacttcaccgtgtataacgagctgaccaaagtgaaatacgtgaccgagggaatgagaaagcccgccttcctgagcggcgagcagaaaaaggccatcgtggacctgctgttcaagaccaaccggaaagtgaccgtgaagcagctgaaagaggactacttcaagaaaatcgagtgcttcgactccgtggaaatctccggcgtggaagatcggttcaacgcctccctgggcacataccacgatctgctgaaaattatcaaggacaaggacttcctggacaatgaggaaaacgaggacattctggaagatatcgtgctgaccctgacactgtttgaggacagagagatgatcgaggaacggctgaaaacctatgcccacctgttcgacgacaaagtgatgaagcagctgaagcggcggagatacaccggctggggcaggctgagccggaagctgatcaacggcatccgggacaagcagtccggcaagacaatcctggatttcctgaagtccgacggcttcgccaacagaaacttcatgcagctgatccacgacgacagcctgacctttaaagaggacatccagaaagcccaggtgtccggccagggcgatagcctgcacgagcacattgccaatctggccggcagccccgccattaagaagggcatcctgcagacagtgaaggtggtggacgagctcgtgaaagtgatgggccggcacaagcccgagaacatcgtgatcgaaatggccagagagaaccagaccacccagaagggacagaagaacagccgcgagagaatgaagcggatcgaagagggcatcaaagagctgggcagccagatcctgaaagaacaccccgtggaaaacacccagctgcagaacgagaagctgtacctgtactacctgcagaatgggcgggatatgtacgtggaccaggaactggacatcaaccggctgtccgactacgatgtggaccatatcgtgcctcagagctttctgaaggacgactccatcgacaacaaggtgctgaccagaagcgacaagaaccggggcaagagcgacaacgtgccctccgaagaggtcgtgaagaagatgaagaactactggcggcagctgctgaacgccaagctgattacccagagaaagttcgacaatctgaccaaggccgagagaggcggcctgagcgaactggataaggccggcttcatcaagagacagctggtggaaacccggcagatcacaaagcacgtggcacagatcctggactcccggatgaacactaagtacgacgagaatgacaagctgatccgggaagtgaaagtgatcaccctgaagtccaagctggtgtccgatttccggaaggatttccagttttacaaagtgcgcgagatcaacaactaccaccacgcccacgacgcctacctgaacgccgtcgtgggaaccgccctgatcaaaaagtaccctaagctggaaagcgagttcgtgtacggcgactacaaggtgtacgacgtgcggaagatgatcgccaagagcgagcaggaaatcggcaaggctaccgccaagtacttcttctacagcaacatcatgaactttttcaagaccgagattaccctggccaacggcgagatccggaagcggcctctgatcgagacaaacggcgaaaccggggagatcgtgtgggataagggccgggattttgccaccgtgcggaaagtgctgagcatgccccaagtgaatatcgtgaaaaagaccgaggtgcagacaggcggcttcagcaaagagtctatcctgcccaagaggaacagcgataagctgatcgccagaaagaaggactgggaccctaagaagtacggcggcttcgacagccccaccgtggcctattctgtgctggtggtggccaaagtggaaaagggcaagtccaagaaactgaagagtgtgaaagagctgctggggatcaccatcatggaaagaagcagcttcgagaagaatcccatcgactttctggaagccaagggctacaaagaagtgaaaaaggacctgatcatcaagctgcctaagtactccctgttcgagctggaaaacggccggaagagaatgctggcctctgccggcgaactgcagaagggaaacgaactggccctgccctccaaatatgtgaacttcctgtacctggccagccactatgagaagctgaagggctcccccgaggataatgagcagaaacagctgtttgtggaacagcacaagcactacctggacgagatcatcgagcagatcagcgagttctccaagagagtgatcctggccgacgctaatctggacaaagtgctgtccgcctacaacaagcaccgggataagcccatcagagagcaggccgagaatatcatccacctgtttaccctgaccaatctgggagcccctgccgccttcaagtactttgacaccaccatcgaccggaagaggtacaccagcaccaaagaggtgctggacgccaccctgatccaccagagcatcaccggcctgtacgagacacggatcgacctgtctcagctgggaggtgac

SEQ ID NO: 84 - DNA, 4101 bp, Synthetic construct
  source 1..4101: mol_type = other DNA
gacaagaagtacagcatcggcctggacatcggcaccaactctgtgggctgggccgtgatcaccgacgagtacaaggtgcccagcaagaaattcaaggtgctgggcaacaccgaccggcacagcatcaagaagaacctgatcggagccctgctgttcgacagcggcgaaacagccgaggccacccggctgaagagaaccgccagaagaagatacaccagacggaagaaccggatctgctatctgcaagagatcttcagcaacgagatggccaaggtggacgacagcttcttccacagactggaagagtccttcctggtggaagaggataagaagcacgagcggcaccccatcttcggcaacatcgtggacgaggtggcctaccacgagaagtaccccaccatctaccacctgagaaagaaactggtggacagcaccgacaaggccgacctgcggctgatctatctggccctggcccacatgatcaagttccggggccacttcctgatcgagggcgacctgaaccccgacaacagcgacgtggacaagctgttcatccagctggtgcagacctacaaccagctgttcgaggaaaaccccatcaacgccagcggcgtggacgccaaggccatcctgtctgccagactgagcaagagcagacggctggaaaatctgatcgcccagctgcccggcgagaagaagaatggcctgttcggaaacctgattgccctgagcctgggcctgacccccaacttcaagagcaacttcgacctggccgaggatgccaaactgcagctgagcaaggacacctacgacgacgacctggacaacctgctggcccagatcggcgaccagtacgccgacctgtttctggccgccaagaacctgtccgacgccatcctgctgagcgacatcctgagagtgaacaccgagatcaccaaggcccccctgagcgcctctatgatcaagagatacgacgagcaccaccaggacctgaccctgctgaaagctctcgtgcggcagcagctgcctgagaagtacaaagagattttcttcgaccagagcaagaacggctacgccggctacattgacggcggagccagccaggaagagttctacaagttcatcaagcccatcctggaaaagatggacggcaccgaggaactgctcgtgaagctgaacagagaggacctgctgcggaagcagcggaccttcgacaacggcagcatcccccaccagatccacctgggagagctgcacgccattctgcggcggcaggaagatttttacccattcctgaaggacaaccgggaaaagatcgagaagatcctgaccttccgcatcccctactacgtgggccctctggccaggggaaacagcagattcgcctggatgaccagaaagagcgaggaaaccatcaccccctggaacttcgaggaagtggtggacaagggcgcttccgcccagagcttcatcgagcggatgaccaacttcgataagaacctgcccaacgagaaggtgctgcccaagcacagcctgctgtacgagtacttcaccgtgtataacgagctgaccaaagtgaaatacgtgaccgagggaatgagaaagcccgccttcctgagcggcgagcagaaaaaggccatcgtggacctgctgttcaagaccaaccggaaagtgaccgtgaagcagctgaaagaggactacttcaagaaaatcgagtgcttcgactccgtggaaatctccggcgtggaagatcggttcaacgcctccctgggcacataccacgatctgctgaaaattatcaaggacaaggacttcctggacaatgaggaaaacgaggacattctggaagatatcgtgctgaccctgacactgtttgaggacagagagatgatcgaggaacggctgaaaacctatgcccacctgttcgacgacaaagtgatgaagcagctgaagcggcggagatacaccggctggggcaggctgagccggaagctgatcaacggcatccgggacaagcagtccggcaagacaatcctggatttcctgaagtccgacggcttcgccaacagaaacttcatgcagctgatccacgacgacagcctgacctttaaagaggacatccagaaagcccaggtgtccggccagggcgatagcctgcacgagcacattgccaatctggccggcagccccgccattaagaagggcatcctgcagacagtgaaggtggtggacgagctcgtgaaagtgatgggccggcacaagcccgagaacatcgtgatcgaaatggccagagagaaccagaccacccagaagggacagaagaacagccgcgagagaatgaagcggatcgaagagggcatcaaagagctgggcagccagatcctgaaagaacaccccgtggaaaacacccagctgcagaacgagaagctgtacctgtactacctgcagaatgggcgggatatgtacgtggaccaggaactggacatcaaccggctgtccgactacgatgtggacgccatcgtgcctcagagctttctgaaggacgactccatcgacaacaaggtgctgaccagaagcgacaagaaccggggcaagagcgacaacgtgccctccgaagaggtcgtgaagaagatgaagaactactggcggcagctgctgaacgccaagctgattacccagagaaagttcgacaatctgaccaaggccgagagaggcggcctgagcgaactggataaggccggcttcatcaagagacagctggtggaaacccggcagatcacaaagcacgtggcacagatcctggactcccggatgaacactaagtacgacgagaatgacaagctgatccgggaagtgaaagtgatcaccctgaagtccaagctggtgtccgatttccggaaggatttccagttttacaaagtgcgcgagatcaacaactaccaccacgcccacgacgcctacctgaacgccgtcgtgggaaccgccctgatcaaaaagtaccctaagctggaaagcgagttcgtgtacggcgactacaaggtgtacgacgtgcggaagatgatcgccaagagcgagcaggaaatcggcaaggctaccgccaagtacttcttctacagcaacatcatgaactttttcaagaccgagattaccctggccaacggcgagatccggaagcggcctctgatcgagacaaacggcgaaaccggggagatcgtgtgggataagggccgggattttgccaccgtgcggaaagtgctgagcatgccccaagtgaatatcgtgaaaaagaccgaggtgcagacaggcggcttcagcaaagagtctatcctgcccaagaggaacagcgataagctgatcgccagaaagaaggactgggaccctaagaagtacggcggcttcgacagccccaccgtggcctattctgtgctggtggtggccaaagtggaaaagggcaagtccaagaaactgaagagtgtgaaagagctgctggggatcaccatcatggaaagaagcagcttcgagaagaatcccatcgactttctggaagccaagggctacaaagaagtgaaaaaggacctgatcatcaagctgcctaagtactccctgttcgagctggaaaacggccggaagagaatgctggcctctgccggcgaactgcagaagggaaacgaactggccctgccctccaaatatgtgaacttcctgtacctggccagccactatgagaagctgaagggctcccccgaggataatgagcagaaacagctgtttgtggaacagcacaagcactacctggacgagatcatcgagcagatcagcgagttctccaagagagtgatcctggccgacgctaatctggacaaagtgctgtccgcctacaacaagcaccgggataagcccatcagagagcaggccgagaatatcatccacctgtttaccctgaccaatctgggagcccctgccgccttcaagtactttgacaccaccatcgaccggaagaggtacaccagcaccaaagaggtgctggacgccaccctgatccaccagagcatcaccggcctgtacgagacacggatcgacctgtctcagctgggaggtgac

SEQ ID NO: 85 - protein, 1367 aa, Synthetic construct
DKKYSIGLAIGTNSVGWAVITDEYKVPSKKFKVLGNTDRHSIKKNLIGALLFDSGETAEATRLKRTARRRYTRRKNRICYLQEIFSNEMAKVDDSFFHRLEESFLVEEDKKHERHPIFGNIVDEVAYHEKYPTIYHLRKKLVDSTDKADLRLIYLALAHMIKFRGHFLIEGDLNPDNSDVDKLFIQLVQTYNQLFEENPINASGVDAKAILSARLSKSRRLENLIAQLPGEKKNGLFGNLIALSLGLTPNFKSNFDLAEDAKLQLSKDTYDDDLDNLLAQIGDQYADLFLAAKNLSDAILLSDILRVNTEITKAPLSASMIKRYDEHHQDLTLLKALVRQQLPEKYKEIFFDQSKNGYAGYIDGGASQEEFYKFIKPILEKMDGTEELLVKLNREDLLRKQRTFDNGSIPHQIHLGELHAILRRQEDFYPFLKDNREKIEKILTFRIPYYVGPLARGNSRFAWMTRKSEETITPWNFEEVVDKGASAQSFIERMTNFDKNLPNEKVLPKHSLLYEYFTVYNELTKVKYVTEGMRKPAFLSGEQKKAIVDLLFKTNRKVTVKQLKEDYFKKIECFDSVEISGVEDRFNASLGTYHDLLKIIKDKDFLDNEENEDILEDIVLTLTLFEDREMIEERLKTYAHLFDDKVMKQLKRRRYTGWGRLSRKLINGIRDKQSGKTILDFLKSDGFANRNFMQLIHDDSLTFKEDIQKAQVSGQGDSLHEHIANLAGSPAIKKGILQTVKVVDELVKVMGRHKPENIVIEMARENQTTQKGQKNSRERMKRIEEGIKELGSQILKEHPVENTQLQNEKLYLYYLQNGRDMYVDQELDINRLSDYDVDHIVPQSFLKDDSIDNKVLTRSDKNRGKSDNVPSEEVVKKMKNYWRQLLNAKLITQRKFDNLTKAERGGLSELDKAGFIKRQLVETRQITKHVAQILDSRMNTKYDENDKLIREVKVITLKSKLVSDFRKDFQFYKVREINNYHHAHDAYLNAVVGTALIKKYPKLESEFVYGDYKVYDVRKMIAKSEQEIGKATAKYFFYSNIMNFFKTEITLANGEIRKRPLIETNGETGEIVWDKGRDFATVRKVLSMPQVNIVKKTEVQTGGFSKESILPKRNSDKLIARKKDWDPKKYGGFDSPTVAYSVLVVAKVEKGKSKKLKSVKELLGITIMERSSFEKNPIDFLEAKGYKEVKKDLIIKLPKYSLFELENGRKRMLASAGELQKGNELALPSKYVNFLYLASHYEKLKGSPEDNEQKQLFVEQHKHYLDEIIEQISEFSKRVILADANLDKVLSAYNKHRDKPIREQAENIIHLFTLTNLGAPAAFKYFDTTIDRKRYTSTKEVLDATLIHQSITGLYETRIDLSQLGGD

SEQ ID NO: 86 - protein, 1367 aa, Synthetic construct
DKKYSIGLAIGTNSVGWAVITDEYKVPSKKFKVLGNTDRHSIKKNLIGALLFDSGETAEATRLKRTARRRYTRRKNRICYLQEIFSNEMAKVDDSFFHRLEESFLVEEDKKHERHPIFGNIVDEVAYHEKYPTIYHLRKKLVDSTDKADLRLIYLALAHMIKFRGHFLIEGDLNPDNSDVDKLFIQLVQTYNQLFEENPINASGVDAKAILSARLSKSRRLENLIAQLPGEKKNGLFGNLIALSLGLTPNFKSNFDLAEDAKLQLSKDTYDDDLDNLLAQIGDQYADLFLAAKNLSDAILLSDILRVNTEITKAPLSASMIKRYDEHHQDLTLLKALVRQQLPEKYKEIFFDQSKNGYAGYIDGGASQEEFYKFIKPILEKMDGTEELLVKLNREDLLRKQRTFDNGSIPHQIHLGELHAILRRQEDFYPFLKDNREKIEKILTFRIPYYVGPLARGNSRFAWMTRKSEETITPWNFEEVVDKGASAQSFIERMTNFDKNLPNEKVLPKHSLLYEYFTVYNELTKVKYVTEGMRKPAFLSGEQKKAIVDLLFKTNRKVTVKQLKEDYFKKIECFDSVEISGVEDRFNASLGTYHDLLKIIKDKDFLDNEENEDILEDIVLTLTLFEDREMIEERLKTYAHLFDDKVMKQLKRRRYTGWGRLSRKLINGIRDKQSGKTILDFLKSDGFANRNFMQLIHDDSLTFKEDIQKAQVSGQGDSLHEHIANLAGSPAIKKGILQTVKVVDELVKVMGRHKPENIVIEMARENQTTQKGQKNSRERMKRIEEGIKELGSQILKEHPVENTQLQNEKLYLYYLQNGRDMYVDQELDINRLSDYDVDHIVPQSFLADDSIDNKVLTRSDKNRGKSDNVPSEEVVKKMKNYWRQLLNAKLITQRKFDNLTKAERGGLSELDKAGFIKRQLVETRQITKHVAQILDSRMNTKYDENDKLIREVKVITLKSKLVSDFRKDFQFYKVREINNYHHAHDAYLNAVVGTALIKKYPALESEFVYGDYKVYDVRKMIAKSEQEIGKATAKYFFYSNIMNFFKTEITLANGEIRKAPLIETNGETGEIVWDKGRDFATVRKVLSMPQVNIVKKTEVQTGGFSKESILPKRNSDKLIARKKDWDPKKYGGFDSPTVAYSVLVVAKVEKGKSKKLKSVKELLGITIMERSSFEKNPIDFLEAKGYKEVKKDLIIKLPKYSLFELENGRKRMLASAGELQKGNELALPSKYVNFLYLASHYEKLKGSPEDNEQKQLFVEQHKHYLDEIIEQISEFSKRVILADANLDKVLSAYNKHRDKPIREQAENIIHLFTLTNLGAPAAFKYFDTTIDRKRYTSTKEVLDATLIHQSITGLYETRIDLSQLGGD

SEQ ID NO: 87 - protein, 1409 aa, Streptococcus thermophilus
MLFNKCIIISINLDFSNKEKCMTKPYSIGLDIGTNSVGWAVITDNYKVPSKKMKVLGNTSKKYIKKNLLGVLLFDSGITAEGRRLKRTARRRYTRRRNRILYLQEIFSTEMATLDDAFFQRLDDSFLVPDDKRDSKYPIFGNLVEEKVYHDEFPTIYHLRKYLADSTKKADLRLVYLALAHMIKYRGHFLIEGEFNSKNNDIQKNFQDFLDTYNAIFESDLSLENSKQLEEIVKDKISKLEKKDRILKLFPGEKNSGIFSEFLKLIVGNQADFRKCFNLDEKASLHFSKESYDEDLETLLGYIGDDYSDVFLKAKKLYDAILLSGFLTVTDNETEAPLSSAMIKRYNEHKEDLALLKEYIRNISLKTYNEVFKDDTKNGYAGYIDGKTNQEDFYVYLKNLLAEFEGADYFLEKIDREDFLRKQRTFDNGSIPYQIHLQEMRAILDKQAKFYPFLAKNKERIEKILTFRIPYYVGPLARGNSDFAWSIRKRNEKITPWNFEDVIDKESSAEAFINRMTSFDLYLPEEKVLPKHSLLYETFNVYNELTKVRFIAESMRDYQFLDSKQKKDIVRLYFKDKRKVTDKDIIEYLHAIYGYDGIELKGIEKQFNSSLSTYHDLLNIINDKEFLDDSSNEAIIEEIIHTLTIFEDREMIKQRLSKFENIFDKSVLKKLSRRHYTGWGKLSAKLINGIRDEKSGNTILDYLIDDGISNRNFMQLIHDDALSFKKKIQKAQIIGDEDKGNIKEVVKSLPGSPAIKKGILQSIKIVDELVKVMGGRKPESIVVEMARENQYTNQGKSNSQQRLKRLEKSLKELGSKILKENIPAKLSKIDNNALQNDRLYLYYLQNGKDMYTGDDLDIDRLSNYDIDHIIPQAFLKDNSIDNKVLVSSASNRGKSDDFPSLEVVKKRKTFWYQLLKSKLISQRKFDNLTKAERGGLLPEDKAGFIQRQLVETRQITKHVARLLDEKFNNKKDENNRAVRTVKIITLKSTLVSQFRKDFELYKVREINDFHHAHDAYLNAVIASALLKKYPKLEPEFVYGDYPKYNSFRERKSATEKVYFYSNIMNIFKKSISLADGRVIERPLIEVNEETGESVWNKESDLATVRRVLSYPQVNVVKKVEEQNHGLDRGKPKGLFNANLSSKPKPNSNENLVGAKEYLDPKKYGGYAGISNSFAVLVKGTIEKGAKKKITNVLEFQGISILDRINYRKDKLNFLLEKGYKDIELIIELPKYSLFELSDGSRRMLASILSTNNKRGEIHKGNQIFLSQKFVKLLYHAKRISNTINENHRKYVENHKKEFEELFYYILEFNENYVGAKKNGKLLNSAFQSWQNHSIDELCSSFIGPTGSERKGLFELTSRGSAADFEFLGVKIPRYRDYTPSSLLKDATLIHQSVTGLYETRIDLAKLGEG

SEQ ID NO: 88 - protein, 1053 aa, Staphylococcus aureus
MKRNYILGLDIGITSVGYGIIDYETRDVIDAGVRLFKEANVENNEGRRSKRGARRLKRRRRHRIQRVKKLLFDYNLLTDHSELSGINPYEARVKGLSQKLSEEEFSAALLHLAKRRGVHNVNEVEEDTGNELSTKEQISRNSKALEEKYVAELQLERLKKDGEVRGSINRFKTSDYVKEAKQLLKVQKAYHQLDQSFIDTYIDLLETRRTYYEGPGEGSPFGWKDIKEWYEMLMGHCTYFPEELRSVKYAYNADLYNALNDLNNLVITRDENEKLEYYEKFQIIENVFKQKKKPTLKQIAKEILVNEEDIKGYRVTSTGKPEFTNLKVYHDIKDITARKEIIENAELLDQIAKILTIYQSSEDIQEELTNLNSELTQEEIEQISNLKGYTGTHNLSLKAINLILDELWHTNDNQIAIFNRLKLVPKKVDLSQQKEIPTTLVDDFILSPVVKRSFIQSIKVINAIIKKYGLPNDIIIELAREKNSKDAQKMINEMQKRNRQTNERIEEIIRTTGKENAKYLIEKIKLHDMQEGKCLYSLEAIPLEDLLNNPFNYEVDHIIPRSVSFDNSFNNKVLVKQEENSKKGNRTPFQYLSSSDSKISYETFKKHILNLAKGKGRISKTKKEYLLEERDINRFSVQKDFINRNLVDTRYATRGLMNLLRSYFRVNNLDVKVKSINGGFTSFLRRKWKFKKERNKGYKHHAEDALIIANADFIFKEWKKLDKAKKVMENQMFEEKQAESMPEIETEQEYKEIFITPHQIKHIKDFKDYKYSHRVDKKPNRELINDTLYSTRKDDKGNTLIVNNLNGLYDKDNDKLKKLINKSPEKLLMYHHDPQTYQKLKLIMEQYGDEKNPLYKYYEETGNYLTKYSKKDNGPVIKKIKYYGNKLNAHLDITDDYPNSRNKVVKLSLKPYRFDVYLDNGVYKFVTVKNLDVIKKENYYEVNSKCYEEAKKLKKISNQAEFIASFYNNDLIKINGELYRVIGVNNDLLNRIEVNMIDITYREYLENMNDKRPPRIIKTIASKTQSIKKYSTDILGNLYEVKSKKHPQIIKKG

SEQ ID NO: 89 - protein, 1629 aa, Francisella tularensis
MNFKILPIAIDLGVKNTGVFSAFYQKGTSLERLDNKNGKVYELSKDSYTLLMNNRTARRHQRRGIDRKQLVKRLFKLIWTEQLNLEWDKDTQQAISFLFNRRGFSFITDGYSPEYLNIVPEQVKAILMDIFDDYNGEDDLDSYLKLATEQESKISEIYNKLMQKILEFKLMKLCTDIKDDKVSTKTLKEITSYEFELLADYLANYSESLKTQKFSYTDKQGNLKELSYYHHDKYNIQEFLKRHATINDRILDTLLTDDLDIWNFNFEKFDFDKNEEKLQNQEDKDHIQAHLHHFVFAVNKIKSEMASGGRHRSQYFQEITNVLDENNHQEGYLKNFCENLHNKKYSNLSVKNLVNLIGNLSNLELKPLRKYFNDKIHAKADHWDEQKFTETYCHWILGEWRVGVKDQDKKDGAKYSYKDLCNELKQKVTKAGLVDFLLELDPCRTIPPYLDNNNRKPPKCQSLILNPKFLDNQYPNWQQYLQELKKLQSIQNYLDSFETDLKVLKSSKDQPYFVEYKSSNQQIASGQRDYKDLDARILQFIFDRVKASDELLLNEIYFQAKKLKQKASSELEKLESSKKLDEVIANSQLSQILKSQHTNGIFEQGTFLHLVCKYYKQRQRARDSRLYIMPEYRYDKKLHKYNNTGRFDDDNQLLTYCNHKPRQKRYQLLNDLAGVLQVSPNFLKDKIGSDDDLFISKWLVEHIRGFKKACEDSLKIQKDNRGLLNHKINIARNTKGKCEKEIFNLICKIEGSEDKKGNYKHGLAYELGVLLFGEPNEASKPEFDRKIKKFNSIYSFAQIQQIAFAERKGNANTCAVCSADNAHRMQQIKITEPVEDNKDKIILSAKAQRLPAIPTRIVDGAVKKMATILAKNIVDDNWQNIKQVLSAKHQLHIPIITESNAFEFEPALADVKGKSLKDRRKKALERISPENIFKDKNNRIKEFAKGISAYSGANLTDGDFDGAKEELDHIIPRSHKKYGTLNDEANLICVTRGDNKNKGNRIFCLRDLADNYKLKQFETTDDLEIEKKIADTIWDANKKDFKFGNYRSFINLTPQEQKAFRHALFLADENPIKQAVIRAINNRNRTFVNGTQRYFAEVLANNIYLRAKKENLNTDKISFDYFGIPTIGNGRGIAEIRQLYEKVDSDIQAYAKGDKPQASYSHLIDAMLAFCIAADEHRNDGSIGLEIDKNYSLYPLDKNTGEVFTKDIFSQIKITDNEFSDKKLVRKKAIEGFNTHRQMTRDGIYAENYLPILIHKELNEVRKGYTWKNSEEIKIFKGKKYDIQQLNNLVYCLKFVDKPISIDIQISTLEELRNILTTNNIAATAEYYYINLKTQKLHEYYIENYNTALGYKKYSKEMEFLRSLAYRSERVKIKSIDDVKQVLDKDSNFIIGKITLPFKKEWQRLYREWQNTTIKDDYEFLKSFFNVKSITKLHKKVRKDFSLPISTNEGKFLVKRKTWDNNFIYQILNDSDSRADGTKPFIPAFDISKNEIVEAIIDSFTSKNIFWLPKNIELQKVDNKNIFAIDTSKWFEVETPSDLRDIGIATIQYKIDNNSRPKVRVKLDYVIDDDSKINYFMNHSLLKSRYPDKVLEILKQSTIIEFESSGFNKTIKEMLGMKLAGIYNETSNN

SEQ ID NO: 90 - protein, 1101 aa, Actinomyces naeslundii
MWYASLMSAHHLRVGIDVGTHSVGLATLRVDDHGTPIELLSALSHIHDSGVGKEGKKDHDTRKKLSGIARRARRLLHHRRTQLQQLDEVLRDLGFPIPTPGEFLDLNEQTDPYRVWRVRARLVEEKLPEELRGPAISMAVRHIARHRGWRNPYSKVESLLSPAEESPFMKALRERILATTGEVLDDGITPGQAMAQVALTHNISMRGPEGILGKLHQSDNANEIRKICARQGVSPDVCKQLLRAVFKADSPRGSAVSRVAPDPLPGQGSFRRAPKCDPEFQRFRIISIVANLRISETKGENRPLTADERRHVVTFLTEDSQADLTWVDVAEKLGVHRRDLRGTAVHTDDGERSAARPPIDATDRIMRQTKISSLKTWWEEADSEQRGAMIRYLYEDPTDSECAEIIAELPEEDQAKLDSLHLPAGRAAYSRESLTALSDHMLATTDDLHEARKRLFGVDDSWAPPAEAINAPVGNPSVDRTLKIVGRYLSAVESMWGTPEVIHVEHVRDGFTSERMADERDKANRRRYNDNQEAMKKIQRDYGKEGYISRGDIVRLDALELQGCACLYCGTTIGYHTCQLDHIVPQAGPGSNNRRGNLVAVCERCNRSKSNTPFAVWAQKCGIPHVGVKEAIGRVRGWRKQTPNTSSEDLTRLKKEVIARLRRTQEDPEIDERSMESVAWMANELHHRIAAAYPETTVMVYRGSITAAARKAAGIDSRINLIGEKGRKDRIDRRHHAVDASVVALMEASVAKTLAERSSLRGEQRLTGKEQTWKQYTGSTVGAREHFEMWRGHMLHLTELFNERLAEDKVYVTQNIRLRLSDGNAHTVNPSKLVSHRLGDGLTVQQIDRACTPALWCALTREKDFDEKNGLPAREDRAIRVHGHEIKSSDYIQVFSKRKKTDSDRDETPFGAIAVRGGFVEIGPSIHHARIYRVEGKKPVYAMLRVFTHDLLSQRHGDLFSAVIPPQSISMRCAEPKLRKAITTGNATYLGWVVVGDELEINVDSFTKYAIGRFLEDFPNTTRWRICGYDTNSKLTLKPIVLAAEGLENPSSAVNEIVELKGWRVAINVLTKVHPTVVRRDALGRPRYSSRSNLPTSWTIE

SEQ ID NO: 91 - protein, 1082 aa, Neisseria meningitidis
MAAFKPNSINYILGLDIGIASVGWAMVEIDEEENPIRLIDLGVRVFERAEVPKTGDSLAMARRLARSVRRLTRRRAHRLLRTRRLLKREGVLQAANFDENGLIKSLPNTPWQLRAAALDRKLTPLEWSAVLLHLIKHRGYLSQRKNEGETADKELGALLKGVAGNAHALQTGDFRTPAELALNKFEKESGHIRNQRSDYSHTFSRKDLQAELILLFEKQKEFGNPHVSGGLKEGIETLLMTQRPALSGDAVQKMLGHCTFEPAEPKAAKNTYTAERFIWLTKLNNLRILEQGSERPLTDTERATLMDEPYRKSKLTYAQARKLLGLEDTAFFKGLRYGKDNAEASTLMEMKAYHAISRALEKEGLKDKKSPLNLSPELQDEIGTAFSLFKTDEDITGRLKDRIQPEILEALLKHISFDKFVQISLKALRRIVPLMEQGKRYDEACAEIYGDHYGKKNTEEKIYLPPIPADEIRNPVVLRALSQARKVINGVVRRYGSPARIHIETAREVGKSFKDRKEIEKRQEENRKDREKAAAKFREYFPNFVGEPKSKDILKLRLYEQQHGKCLYSGKEINLGRLNEKGYVEIDHALPFSRTWDDSFNNKVLVLGSENQNKGNQTPYEYFNGKDNSREWQEFKARVETSRFPRSKKQRILLQKFDEDGFKERNLNDTRYVNRFLCQFVADRMRLTGKGKKRVFASNGQITNLLRGFWGLRKVRAENDRHHALDAVVVACSTVAMQQKITRFVRYKEMNAFDGKTIDKETGEVLHQKTHFPQPWEFFAQEVMIRVFGKPDGKPEFEEADTLEKLRTLLAEKLSSRPEAVHEYVTPLFVSRAPNRKMSGQGHMETVKSAKRLDEGVSVLRVPLTQLKLKDLEKMVNREREPKLYEALKARLEAHKDDPAKAFAEPFYKYDKAGNRTQQVKAVRVEQVQKTGVWVRNHNGIADNATMVRVDVFEKGDKYYLVPIYSWQVAKGILPDRAVVQGKDEEDWQLIDDSFNFKFSLHPNDLVEVITKKARMFGYFASCHRGTGNINIRIHDLDHKIGKNGILEGIGVKTALSFQKYQIDELGKEIRPCRLKKRPPVR

SEQ ID NO: 92 - protein, 1334 aa, Listeria innocua
MKKPYTIGLDIGTNSVGWAVLTDQYDLVKRKMKIAGDSEKKQIKKNFWGVRLFDEGQTAADRRMARTARRRIERRRNRISYLQGIFAEEMSKTDANFFCRLSDSFYVDNEKRNSRHPFFATIEEEVEYHKNYPTIYHLREELVNSSEKADLRLVYLALAHIIKYRGNFLIEGALDTQNTSVDGIYKQFIQTYNQVFASGIEDGSLKKLEDNKDVAKILVEKVTRKEKLERILKLYPGEKSAGMFAQFISLIVGSKGNFQKPFDLIEKSDIECAKDSYEEDLESLLALIGDEYAELFVAAKNAYSAVVLSSIITVAETETNAKLSASMIERFDTHEEDLGELKAFIKLHLPKHYEEIFSNTEKHGYAGYIDGKTKQADFYKYMKMTLENIEGADYFIAKIEKENFLRKQRTFDNGAIPHQLHLEELEAILHQQAKYYPFLKENYDKIKSLVTFRIPYFVGPLANGQSEFAWLTRKADGEIRPWNIEEKVDFGKSAVDFIEKMTNKDTYLPKENVLPKHSLCYQKYLVYNELTKVRYINDQGKTSYFSGQEKEQIFNDLFKQKRKVKKKDLELFLRNMSHVESPTIEGLEDSFNSSYSTYHDLLKVGIKQEILDNPVNTEMLENIVKILTVFEDKRMIKEQLQQFSDVLDGVVLKKLERRHYTGWGRLSAKLLMGIRDKQSHLTILDYLMNDDGLNRNLMQLINDSNLSFKSIIEKEQVTTADKDIQSIVADLAGSPAIKKGILQSLKIVDELVSVMGYPPQTIVVEMARENQTTGKGKNNSRPRYKSLEKAIKEFGSQILKEHPTDNQELRNNRLYLYYLQNGKDMYTGQDLDIHNLSNYDIDHIVPQSFITDNSIDNLVLTSSAGNREKGDDVPPLEIVRKRKVFWEKLYQGNLMSKRKFDYLTKAERGGLTEADKARFIHRQLVETRQITKNVANILHQRFNYEKDDHGNTMKQVRIVTLKSALVSQFRKQFQLYKVRDVNDYHHAHDAYLNGVVANTLLKVYPQLEPEFVYGDYHQFDWFKANKATAKKQFYTNIMLFFAQKDRIIDENGEILWDKKYLDTVKKVMSYRQMNIVKKTEIQKGEFSKATIKPKGNSSKLIPRKTNWDPMKYGGLDSPNMAYAVVIEYAKGKNKLVFEKKIIRVTIMERKAFEKDEKAFLEEQGYRQPKVLAKLPKYTLYECEEGRRRMLASANEAQKGNQQVLPNHLVTLLHHAANCEVSDGKSLDYIESNREMFAELLAHVSEFAKRYTLAEANLNKINQLFEQNKEGDIKAIAQSFVDLMAFNAMGAPASFKFFETTIERKRYNNLKELLNSTIIYQSITGLYESRKRLDD

SEQ ID NO: 93 - protein, 1345 aa, Streptococcus mutans
MKKPYSIGLDIGTNSVGWAVVTDDYKVPAKKMKVLGNTDKSHIEKNLLGALLFDSGNTAEDRRLKRTARRRYTRRRNRILYLQEIFSEEMGKVDDSFFHRLEDSFLVTEDKRGERHPIFGNLEEEVKYHENFPTIYHLRQYLADNPEKVDLRLVYLALAHIIKFRGHFLIEGKFDTRNNDVQRLFQEFLAVYDNTFENSSLQEQNVQVEEILTDKISKSAKKDRVLKLFPNEKSNGRFAEFLKLIVGNQADFKKHFELEEKAPLQFSKDTYEEELEVLLAQIGDNYAELFLSAKKLYDSILLSGILTVTDVGTKAPLSASMIQRYNEHQMDLAQLKQFIRQKLSDKYNEVFSDVSKDGYAGYIDGKTNQEAFYKYLKGLLNKIEGSGYFLDKIEREDFLRKQRTFDNGSIPHQIHLQEMRAIIRRQAEFYPFLADNQDRIEKLLTFRIPYYVGPLARGKSDFAWLSRKSADKITPWNFDEIVDKESSAEAFINRMTNYDLYLPNQKVLPKHSLLYEKFTVYNELTKVKYKTEQGKTAFFDANMKQEIFDGVFKVYRKVTKDKLMDFLEKEFDEFRIVDLTGLDKENKVFNASYGTYHDLCKILDKDFLDNSKNEKILEDIVLTLTLFEDREMIRKRLENYSDLLTKEQVKKLERRHYTGWGRLSAELIHGIRNKESRKTILDYLIDDGNSNRNFMQLINDDALSFKEEIAKAQVIGETDNLNQVVSDIAGSPAIKKGILQSLKIVDELVKIMGHQPENIVVEMARENQFTNQGRRNSQQRLKGLTDSIKEFGSQILKEHPVENSQLQNDRLFLYYLQNGRDMYTGEELDIDYLSQYDIDHIIPQAFIKDNSIDNRVLTSSKENRGKSDDVPSKDVVRKMKSYWSKLLSAKLITQRKFDNLTKAERGGLTDDDKAGFIKRQLVETRQITKHVARILDERFNTETDENNKKIRQVKIVTLKSNLVSNFRKEFELYKVREINDYHHAHDAYLNAVIGKALLGVYPQLEPEFVYGDYPHFHGHKENKATAKKFFYSNIMNFFKKDDVRTDKNGEIIWKKDEHISNIKKVLSYPQVNIVKKVEEQTGGFSKESILPKGNSDKLIPRKTKKFYWDTKKYGGFDSPIVAYSILVIADIEKGKSKKLKTVKALVGVTIMEKMTFERDPVAFLERKGYRNVQEENIIKLPKYSLFKLENGRKRLLASARELQKGNEIVLPNHLGTLLYHAKNIHKVDEPKHLDYVDKHKDEFKELLDVVSNFSKKYTLAEGNLEKIKELYAQNNGEDLKELASSFINLLTFTAIGAPATFKFFDKNIDRKRYTSTTEILNATLIHQSITGLYETRIDLNKLGGD

SEQ ID NO: 94 - protein, 1084 aa, Corynebacterium diphtheriae
MKYHVGIDVGTFSVGLAAIEVDDAGMPIKTLSLVSHIHDSGLDPDEIKSAVTRLASSGIARRTRRLYRRKRRRLQQLDKFIQRQGWPVIELEDYSDPLYPWKVRAELAASYIADEKERGEKLSVALRHIARHRGWRNPYAKVSSLYLPDGPSDAFKAIREEIKRASGQPVPETATVGQMVTLCELGTLKLRGEGGVLSARLQQSDYAREIQEICRMQEIGQELYRKIIDVVFAAESPKGSASSRVGKDPLQPGKNRALKASDAFQRYRIAALIGNLRVRVDGEKRILSVEEKNLVFDHLVNLTPKKEPEWVTIAEILGIDRGQLIGTATMTDDGERAGARPPTHDTNRSIVNSRIAPLVDWWKTASALEQHAMVKALSNAEVDDFDSPEGAKVQAFFADLDDDVHAKLDSLHLPVGRAAYSEDTLVRLTRRMLSDGVDLYTARLQEFGIEPSWTPPTPRIGEPVGNPAVDRVLKTVSRWLESATKTWGAPERVIIEHVREGFVTEKRAREMDGDMRRRAARNAKLFQEMQEKLNVQGKPSRADLWRYQSVQRQNCQCAYCGSPITFSNSEMDHIVPRAGQGSTNTRENLVAVCHRCNQSKGNTPFAIWAKNTSIEGVSVKEAVERTRHWVTDTGMRSTDFKKFTKAVVERFQRATMDEEIDARSMESVAWMANELRSRVAQHFASHGTTVRVYRGSLTAEARRASGISGKLKFFDGVGKSRLDRRHHAIDAAVIAFTSDYVAETLAVRSNLKQSQAHRQEAPQWREFTGKDAEHRAAWRVWCQKMEKLSALLTEDLRDDRVVVMSNVRLRLGNGSAHKETIGKLSKVKLSSQLSVSDIDKASSEALWCALTREPGFDPKEGLPANPERHIRVNGTHVYAGDNIGLFPVSAGSIALRGGYAELGSSFHHARVYKITSGKKPAFAMLRVYTIDLLPYRNQDLFSVELKPQTMSMRQAEKKLRDALATGNAEYLGWLVVDDELVVDTSKIATDQVKAVEAELGTIRRWRVDGFFSPSKLRLRPLQMSKEGIKKESAPELSKIIDRPGWLPAVNKLFSDGNVTVVRRDSLGRVRLESTAHLPVTWKVQ

SEQ ID NO: 95 - DNA, 66 bp, Saccharomyces bayanus
  source 1..66: mol_type = genomic DNA
ttcttgtcgtacttatagatcgctacgttatttcaattttgaaaatctgagtcctgggagtgcgga

SEQ ID NO: 96 - protein, 605 aa, Homo sapiens
MSGWESYYKTEGDEEAEEEQEENLEASGDYKYSGRDSLIFLVDASKAMFESQSEDELTPFDMSIQCIQSVYISKIISSDRDLLAWFYGTEKDKNSVNFKIYVLQELDNPGAKRILELDQFKGQQGQKRFQDMMGHGSDYSLSEVLWVCANLFSDVQFKMSHKRIMLFTNEDNPHGNDSAKASRARTKAGDLRDTGIFLDLHLKKPGGFDISLFYRDIISIAEDEDLRVHFEESSKLEDLLRKVRAKETRKRALSRLKLKLNKDIVISVGIYNLVQKALKPPPIKLYRETNEPVKTKTRTFNTSTGGLLLPSDTKRSQIYGSRQIILEKEETEELKRFDDPGLMLMGFKPLVLLKKHHYLRPSLFVYPEESLVIGSSTLFSALLIKCLEKEVAALCRYTPRRNIPPYFVALVPQEEELDDQKIQVTPPGFQLVFLPFADDKRKMPFTEKIMATPEQVGKMKAIVEKLRFTYRSDSFENPVLQQHFRNLEALALDLMEPEQAVDLTLPKVEAMNKRLGSLVDEFKELVYPPDYNPEGKVTKRKHDNEGSGSKRPKVEYSEEELKTHISKGTLGKFTVPLKEACRAYGLKSGLKKQELLEALTKHFQD

SEQ ID NO: 97 - protein, 482 aa, Synthetic construct
MVRSGNKAAWLCMDVGFTMSNSIPGIESPFEQAKKVITMFVQRQVFAENKDEIALVLFGTDGTDNPLSGGDQYQNITVHRHLMLPDFDLLEDIESKIQPGSQQADFLDALIVSMDVIQHETIGKKFEKRHIEIFTDLSSRFSKSQLDIIIHSLKKCDISERHSIHWPCRLTIGSNLSIRIAAYKSILQERVKKTTWDAKTLKKEDIQKETVYCLNDDDETEVLKEDIIQGFRYGSDIVPFSKVDEEQMKYKSEGKCFSVLGFCKSSQVQRRFFMGNQVLKVFAARDDEAAAVALSSLIHALDDLDIWAIVRYAYDKRANPQVGVAFPHIKHNYECLVYVQLPFMEDLRQYMFSSLKNSKKYAPTEAQLNAVDALIDSMSLAKKDEKTDTLEDLFPTTKIPNPRFQRLFQCLLHRALHPREPLPPIQQHIWNMLNPPAEVTTKSQIPLSKIKTLFPLIEAKKKDQVTAQEIFQDNHEDGPTAK

SEQ ID NO: 98 - DNA, 10 bp, Methanobacterium thermoautotrophicum
  source 1..10: mol_type = genomic DNA
aatttttgga

SEQ ID NO: 99 - protein, 83 aa, Methanobacterium thermoautotrophicum
GSVIDVSSQRVNVQRPLDALGNSLNSPVIIKLKGDREFRGVLKSFDLHMNLVLNDAEELEDGEVTRRLGTVLIRGDNIVYISP

SEQ ID NO: 100 - DNA, 25 bp, Emesvirus zinderi
  source 1..25: mol_type = genomic DNA
gcgcacatgaggatcacccatgtgc

SEQ ID NO: 101 - protein, 116 aa, Emesvirus zinderi
MASNFTQFVLVDNGGTGDVTVAPSNFANGIAEISSNSRSQAYKVTCSVRQSSAQNRKYTIKVEVPKGAWRSYLNMELTIPIFATNSDCELIVKAMQGLLKDGNPIPSAIAANSGIY

SEQ ID NO: 102 - DNA, 26 bp, Pepevirus rubrum
  source 1..26: mol_type = genomic DNA
ataaggagtttatatggaaaccctta

SEQ ID NO: 103 - protein, 127 aa, Pepevirus rubrum
MSKTIVLSVGEATRTLTEIQSTADRQIFEEKVGPLVGRLRLTASLRQNGAKTAYRVNLKLDQADWDCSTSVCGELPKVRYTQVWSHDVTIVANSTEASRKSLYDLTKSLVATSQVEDLVVNLVPLGR

SEQ ID NO: 104 - DNA, 19 bp, Shigella flexneri
  source 1..19: mol_type = genomic DNA
ctgaatgcctgcgagcatc

SEQ ID NO: 105 - protein, 62 aa, Shigella flexneri
MKSIRCKNCNKLLFKADSFDHIEIRCPRCKRHIIMLNACEHPTEKHCGKREKITHSDETVRY

SEQ ID NO: 106 - protein, 24 aa, Synthetic construct
EELLSKNYHLENEVARLKKGSGSG

SEQ ID NO: 107 - protein, 241 aa, Synthetic construct
EEELLSKNYHLENEVARLKKGSGSGEELLSKNYHLENEVARLKKGSGSGEELLSKNYHLENEVARLKKGSGSGEELLSKNYHLENEVARLKKGSGSGEELLSKNYHLENEVARLKKGSGSGEELLSKNYHLENEVARLKKGSGSGEELLSKNYHLENEVARLKKGSGSGEELLSKNYHLENEVARLKKGSGSGEELLSKNYHLENEVARLKKGSGSGEELLSKNYHLENEVARLKKGSGSG

SEQ ID NO: 108 - protein, 277 aa, Synthetic construct
MGPDIVMTQSPSSLSASVGDRVTITCRSSTGAVTTSNYASWVQEKPGKLFKGLIGGTNNRAPGVPSRFSGSLIGDKATLTISSLQPEDFATYFCALWYSNHWVFGQGTKVELKRGGGGSGGGGSGGGGSSGGGSEVKLLESGGGLVQPGGSLKLSCAVSGFSLTDYGVNWVRQAPGRGLEWIGVIWGDGITDYNSALKDRFIISKDNGKNTVYLQMSKVRSDDTALYYCVTGLFDYWGQGTLVTVSSYPYDVPDYAGGGGGSGGGGSGGGGSGGGGS

SEQ ID NO: 109 - protein, 19 aa, Synthetic construct
MKRTADGSEFESPKKKRKV

SEQ ID NO: 110 - protein, 21 aa, Synthetic construct
SGGSKRTADGSEFEPKKKRKV

SEQ ID NO: 111 - protein, 7 aa, Synthetic construct
PKKKRKV

SEQ ID NO: 112 - protein, 10 aa, Synthetic construct
GSKKRRIKQD

SEQ ID NO: 113 - protein, 24 aa, Synthetic construct
SGGSKRTADGSEFEPKKKRKVGSG

SEQ ID NO: 114 - protein, 28 aa, Synthetic construct
TKYDSGGSKRTADGSEFEPKKKRKVGSG

SEQ ID NO: 115 - DNA, 57 bp, Synthetic construct
  source 1..57: mol_type = other DNA
atgaaacggacagccgacggaagcgagttcgagtcaccaaagaagaagcggaaagtc

SEQ ID NO: 116 - DNA, 63 bp, Synthetic construct
  source 1..63: mol_type = other DNA
tctggcggctcaaaaagaaccgccgacggcagcgaattcgagcccaagaagaagaggaaagtc

SEQ ID NO: 117 - DNA, 30 bp, Synthetic construct
  source 1..30: mol_type = other DNA
ggatctaagaagagaagaattaaacaagat

SEQ ID NO: 118 - DNA, 72 bp, Synthetic construct
  source 1..72: mol_type = other DNA
tctggcggctcaaaaagaaccgccgacggcagcgaattcgagcccaagaagaagaggaaagtcggaagcgga

SEQ ID NO: 119 - DNA, 84 bp, Synthetic construct
  source 1..84: mol_type = other DNA
actaagtatgattctggcggctcaaaaagaaccgccgacggcagcgaattcgagcccaagaagaagaggaaagtcggaagcgga

SEQ ID NO: 120 - DNA, 2073 bp, Soybean chlorotic mottle virus
  source 1..2073: mol_type = genomic DNA
aatactgaaattgtccaaaaacaccgagttttaaccaaaggtaaccctaatgttactttcataaaagttagtataggcaaaagaaatttcttggcttatattgatactggagcaactctgtgctttggaaaaagaaaaatttcaaataattgggaaattttaaaacaaccaaaagaaattatcattgcagataaatcaaaacactatattagagaagctatttctaatgtgtttttaaaaatcgaaaataaagaattcttaatccctatcatatatttacatgattcaggattagatttaattataggaaacaatttcctaaaattataccaaccttttattcagagattggaaacaattgaattaagatggaaaaatcttaataacccaaaagaatctcaaatgatttcaaccaagattcttacaaaaaatgaagtattaaaactttcatttgaaaaaattcatatttgtttagaaaaatatttatttttcaaaacaattgaagaacaactcgaagaagtatgttcagaacatccactggatgaaacaaaaaataaaaatggtcttttaatagaaataagacttaaagacccattacaagaaataaatgtcacaaatagaattccatatacaataagagatgtacaagaattcaaggaggaatgtgaagacctcttaaaaaagggcttaattcgagaatctcaaagtccacacagtgcaccggcattctatgtcgaaaatcacaatgaaatcaagcgtggaaaaagacgcatggtaattaattacaaaaaaatgaatgaagccacaattggcgattcatataagttaccaagaaaagattttattctggaaaaaataaaaggatctttatggttttcaagcttggatgctaaatctggatactaccagctaaggctccatgaaaatacaaagcctctaacagctttttcatgtccacctcagaaacattacgaatggaatgttttaagttttggacttaaacaagcaccatctatatatcaaagatttatggatcaatccctcaagggacttgaacatatatgtttggcatatattgatgacatcctgatctttacaaaaggatctaaagaacaacatgtaaatgatgttcggattgttttgcaaagaatcaaagaaaaaggaattattatttctaagaaaaaatcaaaactgattcaacaggaaatcgaatatctcggtttaaaaatacaagggaatggagaaattgatttatcacctcatacccaagaaaaaattcttcaatttcctgatgaattagaagatagaaaacaaatacagcgttttcttggctgtattaattacattgcaaatgaaggatttttcaaaaatcttgctctagaaagaaagcaccttcaaaagaaaatttctgttaaaaacccctggaaatgggatacaatagatacaaaaatggttcagtccataaaaggcaaaattcaaagcctaccaaaattatataatgcatcgattcaagactttttaatagtcgagacagatgcatcgcaacactcctggagtggatgtttgcgagctttacccaagggaaagcaaaaaatcggactcgatgaattcgggataccgacagctgacctctgcacaggtagcagttcagcttcaagcgataattcgccagctgagattgacaaatgtcattcagccagtaaacaggacactcatgtggccagtaaaataaagaaactcgaaaacgagcttctactttgcaaatatgtttcaggtaccttcacagatacggaaacaagataccctatagcagaactggaggttcttgctggagtaaaagtcctagaaaaatggagaatcgacctcctacaaacgaggttcctcctccgcactgacagcaagtactttgcaggtttttgtaggtacaacatcaagacagactaccggaacggacgtctaatcaggtggcaactacggttacaagcctatcaaccgtacgtggaattaatcaaatcagaaaataacccattcgcagatacgcttacgcgagaatggagcaagccatcaagcagt

SEQ ID NO: 121 - DNA, 2034 bp, Cauliflower mosaic virus
  source 1..2034: mol_type = genomic DNA
gatcatctacttctgaagactcagactcagactgagcaggtgatgaacgtcaccaatcccaattcgatctacatcaagggaagactctacttcaagggatacaagaagatagaacttcactgtttcgtagacacgggagcaagcctatgcatagcatccaagttcgtcataccagaagaacattgggtcaatgcagaaagaccaattatggtcaaaatagcagatggaagctcaatcaccatcagcaaagtctgcaaagacatagacttgatcatagccggcgagatattcagaattcccaccgtctatcagcaagaaagtggcatcgatttcattatcggcaacaacttctgtcagctgtatgaaccattcatacagtttacggatagagttatcttcacaaagaacaagtcttatcctgttcatattgcgaagctaaccagagcagtgcgagtaggcaccgaaggatttcttgaatcaatgaagaaacgttcaaaaactcaacaaccagagccagtgaacatttctacaaacaagatagaaaatccactagaagaaattgctattctttcagaggggaggaggttatcagaagaaaaactctttatcactcaacaaagaatgcaaaaaatcgaagaactacttgagaaagtatgttcagaaaatccattagatcctaacaagactaagcaatggatgaaagcttctatcaagctcagcgacccaagcaaagctatcaaggttaaacccatgaagtatagcccaatggatcgcgaagaatttgacaagcaaatcaaagaattactggacctaaaagtcatcaagcccagtaaaagccctcacatggcaccagccttcttggtcaacaatgaagccgagaagcgaagaggaaagaaacgtatggtagtcaactacaaagctatgaacaaagctactgtaggagatgcctacaatcttcccaacaaagacgagttacttacactcattcgaggaaagaagatcttctcttccttcgactgtaagtcaggattctggcaagttctgctagatcaagaatcaagacctctaacggcattcacatgtccacaaggtcactacgaatggaatgtggtccctttcggcttaaagcaagctccatccatattccaaagacacatggacgaagcatttcgtgtgttcagaaagttctgttgcgtttatgtcgacgacattctcgtattcagtaacaacgaagaagatcatctacttcacgtagcaatgatcttacaaaagtgtaatcaacatggaattatcctttccaagaagaaagcacaactcttcaagaagaagataaacttccttggtctagaaatagatgaaggaacacataagcctcaaggacatatcttggaacacatcaacaagttccccgatacccttgaagacaagaagcaacttcagagattcttaggcatactaacatatgcctcggattacatcccgaagctagctcaaatcagaaagcctctgcaagccaagcttaaagaaaacgttccatggagatggacaaaagaggataccctctacatgcaaaaggtgaagaaaaatctgcaaggatttcctccactacatcatcccttaccagaggagaagctgatcatcgagaccgatgcatcagacgactactggggaggtatgttaaaagctatcaaaattaacgaaggtactaatactgagttaatttgcagatacgcatctggaagctttaaagctgcagaaaagaattaccacagcaatgacaaagagacattggcggtaataaatactataaagaaatttagtatttatctaactcctgttcattttctgattaggacagataatactcatttcaagagtttcgttaatctcaattacaaaggagattcgaaacttggaagaaacatcagatggcaagcatggcttagccactattcatttgatgttgaacacattaaaggaaccgacaaccactttgcggacttcctttcaagagaattcaataaggttaattcc

SEQ ID NO: 122 - protein, 683 aa, Moloney Murine Leukemia Virus
TLNIEDEHRLHETSKEPDVSLGSTWLSDFPQAWAETGGMGLAVRQAPLIIPLKATSTPVSIKQYPMSQEARLGIKPHIQRLLDQGILVPCQSPWNTPLLPVKKPGTNDYRPVQDLREVNKRVEDIHPTVPNPYNLLSGLPPSHQWYTVLDLKDAFFCLRLHPTSQPLFAFEWRDPEMGISGQLTWTRLPQGFKNSPTLFDEALHRDLADFRIQHPDLILLQYVDDLLLAATSELDCQQGTRALLQTLGNLGYRASAKKAQICQKQVKYLGYLLKEGQRWLTEARKETVMGQPTPKTPRQLREFLGTAGFCRLWIPGFAEMAAPLYPLTKTGTLFNWGPDQQKAYQEIKQALLTAPALGLPDLTKPFELFVDEKQGYAKGVLTQKLGPWRRPVAYLSKKLDPVAAGWPPCLRMVAAIAVLTKDAGKLTMGQPLVILAPHAVEALVKQPPDRWLSNARMTHYQALLLDTDRVQFGPVVALNPATLLPLPEEGLQHNCLDILAEAHGTRPDLTDQPLPDADHTWYTDGSSLLQEGQRKAGAAVTTETEVIWAKALPAGTSAQRAELIALTQALKMAEGKKLNVYTDSRYAFATAHIHGEIYRRRGLLTSEGKEIKNKDEILALLKALFLPKRLSIIHCPGHQKGHSAEARGNRMADQAARKAAITETPDTSTLLIENSSPNSRLIN

SEQ ID NO: 123 - protein, 717 aa, Moloney Murine Leukemia Virus
MKRTADGSEFESPKKKRKVTLNIEDEHRLHETSKEPDVSLGSTWLSDFPQAWAETGGMGLAVRQAPLIIPLKATSTPVSIKQYPMSQEARLGIKPHIQRLLDQGILVPCQSPWNTPLLPVKKPGTNDYRPVQDLREVNKRVEDIHPTVPNPYNLLSGLPPSHQWYTVLDLKDAFFCLRLHPTSQPLFAFEWRDPEMGISGQLTWTRLPQGFKNSPTLFNEALHRDLADFRIQHPDLILLQYVDDLLLAATSELDCQQGTRALLQTLGNLGYRASAKKAQICQKQVKYLGYLLKEGQRWLTEARKETVMGQPTPKTPRQLREFLGKAGFCRLFIPGFAEMAAPLYPLTKPGTLFNWGPDQQKAYQEIKQALLTAPALGLPDLTKPFELFVDEKQGYAKGVLTQKLGPWRRPVAYLSKKLDPVAAGWPPCLRMVAAIAVLTKDAGKLTMGQPLVILAPHAVEALVKQPPDRWLSNARMTHYQALLLDTDRVQFGPVVALNPATLLPLPEEGLQHNCLDILAEAHGTRPDLTDQPLPDADHTWYTDGSSLLQEGQRKAGAAVTTETEVIWAKALPAGTSAQRAELIALTQALKMAEGKKLNVYTDSRYAFATAHIHGEIYRRRGWLTSEGKEIKNKDEILALLKALFLPKRLSIIHCPGHQKGHSAEARGNRMADQAARKAAITETPDTSTLLIENSSPSGGSKRTADGSEFEPKKKRKV

SEQ ID NO: 124 - protein, 683 aa, Synthetic construct
TLNIEDEHRLHETSKEPDVSLGSTWLSDFPQAWAETGGMGLAVRQAPLIIPLKATSTPVSIKQYPMSQEARLGIKPHIQRLLDQGILVPCQSPWNTPLLPVKKPGTNDYRPVQDLREVNKRVEDIHPTVPNPYNLLSGLPPSHQWYTVLDLKDAFFCLRLHPTSQPLFAFEWRDPEMGISGQLTWTRLPQGFKNSPTLFNEALHRDLADFRIQHPDLILLQYVDDLLLAATSELDCQQGTRALLQTLGNLGYRASAKKAQICQKQVKYLGYLLKEGQRWLTEARKETVMGQPTPKTPRQLREFLGKAGFCRLFIPGFAEMAAPLYPLTKPGTLFNWGPDQQKAYQEIKQALLTAPALGLPDLTKPFELFVDEKQGYAKGVLTQKLGPWRRPVAYLSKKLDPVAAGWPPCLRMVAAIAVLTKDAGKLTMGQPLVILAPHAVEALVKQPPDRWLSNARMTHYQALLLDTDRVQFGPVVALNPATLLPLPEEGLQHNCLDILAEAHGTRPDLTDQPLPDADHTWYTDGSSLLQEGQRKAGAAVTTETEVIWAKALPAGTSAQRAELIALTQALKMAEGKKLNVYTDSRYAFATAHIHGEIYRRRGWLTSEGKEIKNKDEILALLKALFLPKRLSIIHCPGHQKGHSAEARGNRMADQAARKAAITETPDTSTLLIENSSPNSRLIN

SEQ ID NO: 125 - DNA, 2031 bp, Synthetic construct
  source 1..2031: mol_type = other DNA
accctgaacatcgaggacgagtatcggcttcatgagaccagcaaagagccggacgtctccctgggaagcacctggctgagcgacttcccgcaagcctgggcggagaccggtggtatggggctcgcagtgcggcaagcgccgttgataatcccgctaaaggccacgagcacgcccgtgtctatcaagcagtacccgatgagtcaagaggcacgcctcggtatcaagccgcatatccagcgcctcctggaccagggcatcctcgtgccctgccagtctccctggaatacgcctctgctacccgtcaagaagcctggcaccaacgattacaggccggtgcaagacctgcgtgaggtcaacaagcgcgtggaggacatccacccaacggtgcccaacccgtacaatctcctatctggccttccgccctcgcaccagtggtacacggtcttggacctaaaggacgcattcttctgtctgaggctgcaccctacgtcccagccgctgttcgccttcgagtggcgcgacccggagatgggcatctctggccagctaacttggacgcgattgccccaggggtttaagaactcgcccacactcttcaacgaggcactccaccgtgacctggccgactttcgcatacagcaccccgaccttatcctgttgcagtacgtcgatgacctgctcctggcggccacgtccgagctggactgccagcaaggcacccgcgccctacttcaaaccctgggcaacctgggttaccgtgcgtccgccaagaaggcccaaatctgccaaaagcaagtcaagtacctcggctacctcttgaaggagggacagcgctggctgacggaggcgaggaaggagacggtgatgggtcagcccacacccaagaccccgaggcagctaagggagttcctggggaaggcgggcttctgccgtctattcatccctggcttcgcggagatggcggccccgctgtacccgctaacgaagccgggcacgctgttcaactggggccctgaccagcagaaggcgtaccaggagatcaagcaagcgttgcttactgccccagcactcggcctccccgacctcacaaagccgttcgagctattcgttgacgagaaacagggctacgcgaagggtgtgctgactcaaaagctagggccgtggcgacgcccagtagcctacctgagcaagaagctcgaccccgtggcggcgggctggccaccatgcctccggatggtcgcggctatcgcggtgctcacaaaggatgcggggaagctcacgatggggcagcccctggtgatcctggccccacacgcggtggaggcgttagtgaagcaacctcccgaccgatggctgagcaacgcccgcatgacccactaccaggcgctcctcctcgacaccgaccgcgtgcaattcggccctgtcgtggcactgaacccggccacgctgctcccactgcccgaggaggggctacagcacaactgcctcgatatactggcggaagcccacggcacccgccccgacttgacggaccagccgcttcccgacgcggaccatacgtggtacaccgacgggagttccttactccaagagggccagcgaaaggcgggcgctgcggtgaccactgagacggaagtaatctgggcaaaggcgctgcctgcgggcacgtctgcccagcgggcggagctgatcgccctgacccaggccctcaagatggccgagggcaagaagctgaacgtttacaccgacagtcggtatgccttcgcaactgcccacatccacggcgaaatctaccgtcggcgcggctggctgacgagcgagggcaaggagatcaagaacaaggacgagatcctcgccctgctaaaggcactcttcctgcccaagcgactgtccatcattcactgtccggggcaccagaagggccattccgccgaggcgcggggcaaccgcatggcggatcaggccgctcggaaggcggcgatcaccgagacgcccgatacgagcacgctcctgattgaaaactcgtcgccg

SEQ ID NO: 126 - DNA, 2031 bp, Synthetic construct
  source 1..2031: mol_type = other DNA
accctgaacattgaggacgagtatcgcctgcacgagaccagcaaggagcccgacgtgagcctcggctcaacgtggctcagtgacttcccacaagcctgggccgagactggtggaatggggctggccgtgcgccaagctcccctcatcattcctctcaaggccacttcgacgcctgtctccatcaagcagtaccccatgtcccaggaggctaggctgggcatcaagccgcacatccaacgcctgttagatcaaggaatactggtcccctgccagtcgccgtggaatactccgctactgcctgtcaagaagccgggcacgaacgactaccggcctgtccaagacctgcgcgaggtgaacaagcgggtcgaggacattcaccccaccgttcccaacccttacaacctattgtctggcctcccaccgagccatcagtggtacaccgtcctggacctcaaggatgcgttcttctgtctgcggctacaccctacgtcgcaaccactcttcgccttcgagtggcgggatccggagatggggatctcggggcagctcacgtggactcggctgcctcaggggttcaagaactccccaacactctttaacgaggcactgcatcgggatctggccgacttccgtatccagcacccagacctcatcctcctacagtacgtggacgacttgctgctggccgcgaccagcgagctggactgccagcaagggacacgcgcgctgctccagacgctcgggaacctgggataccgcgccagcgctaagaaggctcaaatctgtcagaaacaagtgaagtacctgggttacctgctcaaggagggtcagcgttggcttaccgaggcccgcaaggagaccgtgatggggcaacccacgccaaagacgccccgacagctacgcgagttcctgggcaaggctgggttctgtcggttgttcatccccggtttcgctgagatggccgcccctctctacccgctgacgaaacctgggactctgttcaactggggccctgaccagcagaaggcgtaccaggagatcaagcaagcgctgcttaccgccccggcgctcggattgccggaccttaccaagcccttcgagctgttcgtggacgagaagcaaggttacgcgaagggcgtcctgacacaaaagttggggccctggcgtaggccggtcgcctacctcagcaagaagttggaccccgtggcggcgggctggccgccgtgcctccgtatggtggcagccatcgccgttctcaccaaagacgctggcaagctcacgatggggcagcctctggtgatcctggcaccccatgccgtcgaggcgctcgtgaagcagccgcctgaccgctggctgagtaacgcacggatgacccattaccaagccctattgctagacacggatcgcgtccaatttgggcccgtggtggctctgaaccctgccactctccttcccctccctgaggagggcttgcagcataactgcctggacatactggctgaggcccacgggacaaggccggacctaacggaccagcctctaccggacgcggatcacacatggtacaccgacggctcctctctcctacaagaggggcagcggaaggcgggtgccgccgtcaccacggagacggaggtgatctgggctaaggcactgcccgccgggacttcggcacagcgagccgagctaatagccctcacacaagcgctgaaaatggccgagggcaagaagctaaacgtctatacggactcccgatacgctttcgccaccgcccacattcatggcgaaatctaccgccgccgtggctggctgacgtccgagggcaaggagatcaagaacaaggacgagatcctcgccctcctgaaagccctgttcctgccgaaaaggctttcgataatccactgccccggccaccagaaggggcactccgccgaggcacgcggcaaccgtatggccgaccaggccgcccggaaggcggcgatcacggaaaccccggacacatccacgctcctcatcgagaacagcagcccc

SEQ ID NO: 127 - DNA, 2031 bp, Synthetic construct
  source 1..2031: mol_type = other DNA
accctcaacatcgaggacgagtaccgtctgcacgagacgtcgaaggagccggatgtctcactcggctccacgtggctcagcgacttcccacaggcgtgggcggagaccggtggcatgggactggcggtgcgacaagcgccccttatcattcccctaaaggcgacgtcaactcctgtttccattaagcagtaccctatgtcccaggaggcccggctcggcatcaagccacacatccaacggctattggaccagggtatcttggtgccgtgccaatccccgtggaacactccccttctacccgtcaagaagccaggcaccaacgactaccgccccgtgcaagacctgcgcgaggtcaacaagcgagtggaggacatccatcctaccgtcccgaacccgtacaacctgctttccggcctcccgccctcgcaccagtggtacaccgttctcgacttgaaggacgcattcttctgtctgcgcctccacccaacgagccagcccctcttcgctttcgagtggcgcgacccggagatgggaatttcgggccagcttacatggacccgcctcccacaggggttcaagaacagcccgacgctgttcaacgaggccctgcaccgcgacttggcagacttccgaatccagcatcccgacctaatcctcctgcaatacgttgacgacttattgctggccgcgaccagcgagcttgactgccagcaagggactcgcgcgcttctacagacgctcgggaacctgggctaccgtgcctcagctaagaaggcccagatttgccagaagcaagttaagtatctcggctacctcctcaaggagggacagcggtggctgacggaggcccgcaaggagacggtcatgggccagccaacaccgaaaacgcccagacaactccgcgagttcctcggcaaagcgggcttctgtcggctgtttatccccggcttcgccgagatggccgcgcccctctacccactgacgaaacccggcaccctgttcaactggggcccggatcagcagaaggcgtatcaggagatcaagcaagcactcctgacagccccggccctgggattgcccgaccttacgaagcccttcgagttattcgtggacgagaagcaaggctatgcgaagggtgtcctcacgcagaagctggggccctggaggcggcccgtcgcgtacctaagcaagaagctcgacccagtggcggcgggttggccgccctgcctccgcatggtggccgcgattgcggttctcacaaaggacgccgggaagctcacgatggggcagccacttgtcatcctcgctccgcacgccgtggaggcactggtgaagcagccgccggatcgctggctgtctaatgctcgcatgacccactatcaggcgctgctcctagacactgacagggttcagttcggccccgttgtcgcgcttaaccccgctacactactcccgctgccggaggagggtttgcagcataactgcctcgacatcctcgccgaggcccacggcacgcgacccgacctaacggaccagccgctgccggacgctgaccacacttggtacaccgacggcagctccctcctgcaagagggacagcggaaggccggtgccgccgtgacgacggagacggaggtgatatgggctaaggccctgcccgctggtacgtccgcccagcgagccgagctgatcgccctgacgcaagccctcaagatggccgagggcaagaagctaaacgtctatacggacagccgctacgcattcgccacagcccacattcacggagagatataccggaggcgcggctggcttacgtccgaaggcaaggagattaagaacaaagatgagattctggcgctgttgaaggccctcttcctccccaagcggctttccatcatacactgtccaggccaccagaagggccactcggcggaggcgcggggcaaccggatggccgaccaggcggcgcgcaaagccgcgatcacggagaccccagacacttccacgctcctgatcgagaacagtagcccc

SEQ ID NO: 128 - DNA, 2031 bp, Synthetic construct
  source 1..2031: mol_type = other DNA
actttgaatatcgaagatgagtaccggctacatgagacgtctaaggagcctgatgtttcactcgggagcacttggctaagcgatttcccacaagcgtgggctgaaacgggcgggatgggcctcgctgtaagacaagcgccacttatcatcccgcttaaagctacttctactcccgtctctattaagcaatacccaatgtcccaggaagctcgtttgggcattaagcctcatatacaaaggctactcgatcagggcatacttgttccctgccaatcaccgtggaatacgcccctattaccagttaagaagcctgggactaacgactatcgccccgtacaggatctacgtgaggtgaacaagcgtgtagaggacatccatccgaccgttccgaatccatacaatttgctttctggattacctccaagtcatcaatggtacaccgtgctggatctcaaggacgcattcttctgtctaagattacatcctactagccagccacttttcgcattcgagtggcgagatcccgagatgggaatttcgggccagcttacatggacgaggcttcctcaaggcttcaagaactctcctaccttgttcaatgaggctctacaccgcgacctcgcagacttccggatacaacatccggacctcatactcctacaatatgtggacgatctattgctggccgcgacgagcgaattggattgtcagcaaggaacccgcgccttgttacaaacgttggggaacttggggtatcgagcatcagccaagaaggcacaaatctgccagaaacaagtgaagtatttggggtacttactgaaagaggggcaacgatggttgaccgaagctcgcaaggaaactgttatgggccagccgacacctaagactccaagacagctccgagagttcctcggcaaggctgggttctgtcgcctattcattcctgggtttgccgaaatggctgctcctctgtacccgttgaccaaaccgggaaccttgttcaattggggaccagatcaacagaaggcgtatcaggagatcaagcaagcgctgttgactgcgcctgcgttgggcttgccggatttgacaaaaccctttgaacttttcgttgacgagaaacaaggttacgcgaagggagttcttacacaaaagctgggcccctggagacgacctgttgcttatcttagcaagaagttagatcccgttgctgcggggtggccgccctgcttgaggatggttgccgccattgcggttctgactaaagatgcgggcaaattgacgatgggccagccgctcgtaattctcgccccgcacgcagtcgaagccctagtgaagcagcctcctgaccgttggctctccaacgctcggatgacccactatcaagcgctgctgttggataccgatagagttcaattcgggccggtcgtagcgctcaatcccgcaacgctattacccctgcctgaggagggactacaacataactgcttggatattctagcggaggctcatgggacaagacctgacttgacagatcagcccttgccagatgccgaccacacatggtacactgacggctcatcacttctacaagagggccaaaggaaggccggagctgcggtgacgactgaaaccgaggtgatctgggcaaaggctttacccgctggaacttctgctcagcgcgcagagcttatcgccctaactcaagccctgaaaatggctgagggcaagaagttgaatgtctataccgattcacggtatgctttcgctaccgcccacattcatggagaaatctatcggcgacgaggttggctcacgtctgaggggaaggagattaagaacaaggacgaaatcttagctctgctgaaagctctattcttacccaaacgcttgtcgattatccactgcccaggacaccaaaagggccattccgccgaagccaggggaaaccgtatggccgatcaagctgcccggaaggctgcaataaccgaaacccctgacacttccacgctactcatcgaaaactctagccca

SEQ ID NO: 129 - DNA, 2031 bp, Synthetic construct
  source 1..2031: mol_type = other DNA
accttgaatatcgaagatgagtacagactccatgagaccagcaaggagcctgatgtgagcctgggaagtacatggctatctgactttcctcaggcttgggcggagaccggtggcatgggcctggctgtccggcaagcacccctaatcatcccgttgaaagcaacgtccacacccgtatctatcaagcagtacccgatgagccaagaggcacggctagggattaagccgcacatccaaagattgttagaccaggggatactcgttccctgtcaatctccgtggaacacaccgttactgcctgttaagaagcccggcacaaatgattatcggcctgtacaagacctgcgcgaagtgaacaaacgagtggaagatattcaccccaccgtgccgaatccttacaacttgctaagcggtttaccacccagtcaccagtggtacaccgtcttggacctcaaagacgcattcttctgcttgcggttgcatcctacgagtcagccgctctttgcctttgaatggagagatcccgagatgggcataagtggtcagcttacatggacgaggctacctcagggattcaagaactcgcctaccttattcaatgaggctctacacagggatcttgctgactttcggatacaacaccctgacttaattctgctacaatatgttgacgatctgctgcttgcggcgaccagtgaactcgactgccaacaagggacaagagccttgttacagacacttggcaatctcggctaccgcgcgtctgctaagaaggcacagatttgccaaaagcaagtgaagtatctcggttacctgctgaaagagggacaaagatggttgaccgaagccaggaaggaaactgtcatggggcaacccacccctaaaaccccaagacagcttagagagttcctcgggaaagctgggttctgccgcctgttcattcccggtttcgctgaaatggctgcacctctatacccactgaccaaaccgggcacgctattcaattggggaccggatcaacaaaaggcttaccaggagatcaagcaagctctattgacagctccggctctgggtttacccgacttgactaaacccttcgagttgttcgttgacgagaaacagggctacgcgaaaggcgtactgacgcagaaactgggcccgtggcggcgacccgttgcttacctttccaagaagctggaccctgttgccgctggctggccgccctgccttcgcatggttgcggccattgctgtccttacgaaagatgctgggaaactaactatgggtcagccgctcgtaattctcgcgccacacgctgtcgaggctctagtcaaacaacctcctgaccgctggctgtcgaatgcacggatgacacattaccaggcgttgctattggacactgaccgagtacaatttggaccagtagtggctttaaatcccgcgacactccttccccttcctgaggagggtttgcaacacaactgtcttgatatacttgctgaggcccacggaacaagacccgatctcacagatcaacccctccccgacgcagatcacacctggtacaccgacggttcaagcctgttacaggaaggccagcgaaaggccggagcagccgtgacaaccgaaaccgaagttatctgggcaaaggccctaccagccgggacaagcgcgcagagggccgagctgatcgcgctcacacaagcactcaaaatggccgaaggcaagaagctcaatgtttacactgattcccgctacgcattcgctaccgctcatattcacggagaaatctacaggaggcgagggtggcttactagcgaaggaaaggagattaagaacaaagacgagatcctggcactattgaaagccttgttcctgccaaagcgcttatctatcattcactgtccgggccaccagaagggccacagtgctgaggctcggggcaatcggatggcagatcaggccgcacgaaaagccgcaattactgagacacctgacacatctaccttgctgattgagaactcgtctccg

SEQ ID NO: 130 - DNA, 2073 bp, Synthetic construct
  source 1..2073: mol_type = other DNA
aacactgagattgttcaaaaacatagagtgcttaccaaaggaaatccaaatgttacatttataaaagtgtccatagggaagagaaattttttagcttatattgacactggagccacactctgttttggaaaaaggaaaatatcaaataactgggaaatccttaagcaacccaaagaaatcattatcgctgataagtcaaaacactacatcagagaagctataagtaacgtattcctgaaaattgaaaacaaggagttcttgatacccattatatatcttcatgattcagggttggatttgattattgggaataacttcctgaagctttatcaaccatttattcaaagacttgaaactatcgaactcaggtggaaaaacttgaacaatcccaaagagtctcaaatgattagcactaaaattcttacgaaaaatgaagttcttaagctgagttttgagaagattcatatttgtctcgaaaaataccttttctttaaaaccatcgaggaacaacttgaggaggtttgttctgaacatccacttgatgagacaaagaacaagaatggtcttttgattgagatacgtctgaaagatcctctgcaggagattaacgtcacaaataggattccatataccattagagatgtacaggaattcaaggaagaatgtgaagatttacttaagaagggtctcattcgtgaatcacaatctccccacagtgcacccgcattttacgttgaaaatcataatgaaattaagagaggcaagcgtagaatggttatcaactacaagaagatgaatgaagcaaccataggagatagctacaaactcccgcgaaaggattttatcttagagaagataaagggcagtttgtggttttcaagtttagatgcaaaatcaggttattatcagcttcgcttacatgagaacacaaagcctctcactgctttctcttgccctcctcaaaaacattatgaatggaatgtgttgagtttcggtctaaaacaggcaccttcgatttaccagcgcttcatggaccagtccttaaagggattagagcacatttgcttggcatatatagatgatatcttaatctttactaaaggctcaaaggaacagcatgtcaatgatgttcggattgtcctgcaaagaataaaagagaaaggaatcataatatctaaaaaaaaatcaaaattgattcagcaagagattgaatatctaggattgaaaattcaaggtaatggtgaaattgacctctcaccacatactcaagaaaagatcctacagttccctgatgaactggaggatagaaaacaaatacagaggtttctaggttgcattaattacattgcgaacgaaggatttttcaaaaatcttgccctagagagaaagcacttgcagaagaagatttccgtgaagaatccatggaagtgggatacaatagacacaaaaatggtgcaatcaatcaagggcaaaattcaatccctgccgaagctctacaatgcaagtattcaggatttcctaattgtagagactgacgcctcgcaacattcttggtctgggtgtttgcgggctcttccaaagggcaagcagaaaatcggtctggacgaatttgggattccaacggcagatttatgtactggtagctccagtgcttcctctgataattctcctgctgagatcgacaagtgccactcagcctcgaagcaggatacacacgtcgcctctaaaataaagaaacttgagaatgagttacttttgtgcaagtatgtttcagggactttcacggacaccgagactaggtatcctatagctgaactcgaggtgttggcgggtgttaaagttttggaaaaatggaggatagacttgttgcaaacacgatttctacttaggacagattccaaatattttgctggattttgtagatacaacattaagactgattatcggaacgggaggctcataagatggcaattgcgccttcaagcttaccagccttatgtggaactgatcaagagtgaaaataatccttttgcagacaccctaacacgagagtggagcaaaccatcttctagc

SEQ ID NO: 131 - DNA, 2034 bp, Synthetic construct
  source 1..2034: mol_type = other DNA
gatcaccttctgcttaagacacagacacaaactgaacaagttatgaatgtgaccaacccgaattccatttacattaagggacgactctactttaaggggtataagaaaatagaattacattgtttcgtcgacactggagcatctctctgcatagcgtccaagtttgttattcctgaggaacattgggtaaatgcagaaaggccgattatggttaaaattgcagatggtagcagcatcacaatctcaaaagtttgcaaggacattgacttgatcattgctggtgagattttcagaattcctacagtgtatcaacaagaatccggcattgattttataattggtaataacttttgtcaactttatgagcccttcatacaatttacagatcgagtcatttttactaaaaacaagagttaccctgttcacattgcaaaactcactcgtgccgtgagagttggaacggaaggatttctagaatctatgaagaagagatcgaaaactcagcaaccagaacccgttaatatttctacaaataagattgaaaatccattagaggaaatagccatcttgtccgaaggccggcggttgagtgaagaaaagttgtttatcacgcagcagagaatgcaaaaaatagaggagcttctcgaaaaggtttgttctgagaatcctttggatccaaataaaacaaaacaatggatgaaagctagtataaagctttcagacccatcaaaggcaattaaggtgaagccaatgaaatatagccccatggatagggaggagtttgacaagcaaattaaggagctactcgatctgaaagtaataaaaccttctaaatcgcctcacatggctccagcattcctggttaacaacgaggctgaaaagcgcagaggaaaaaaaagaatggtggtgaactacaaagcaatgaataaggctactgttggagatgcttataatcttcctaataaagatgagctcttgaccttaattagagggaagaaaattttctcctcatttgattgtaaatcaggattttggcaagtgttgctggatcaagagtctcgtccactgaccgcctttacgtgccctcaaggacattatgaatggaatgtcgtaccatttggtctcaagcaagcaccttctattttccagaggcatatggatgaagcatttagagtgtttaggaaattctgctgtgtttatgtggatgatatattggtattctcaaataatgaggaagaccatttgctgcatgttgccatgattcttcagaagtgcaatcaacatggaatcatcttatccaagaagaaggctcagttgttcaagaagaagataaattttttgggtctcgagattgatgaggggacacataagcctcagggtcatatactagaacatatcaacaagtttccagacactttggaagacaaaaagcagttgcaaaggttccttgggattctgacttatgcttcagattatataccaaagcttgctcaaataagaaaaccccttcaggcgaagctcaaagaaaacgttccttggaggtggactaaggaggataccttatacatgcagaaagtcaagaaaaacctccagggtttcccaccgctccaccatcctttacctgaagaaaaactaattatcgagacagatgcttctgatgactactggggcggcatgttgaaggccatcaaaatcaatgaagggaccaatactgagctcatttgtcgatatgcaagcggaagttttaaagcagctgagaaaaattatcatagtaatgataaagagactctagccgttattaacaccataaagaaattctctatatatcttacccccgtccactttttaatcaggacagacaacactcacttcaaatcatttgtgaacctgaattacaagggtgatagtaaacttggccgtaacatacgctggcaggcttggttgagccactactcttttgatgtagaacacattaaaggaacagataatcattttgctgatttcctttctcgcgagttcaacaaagtaaattca

SEQ ID NO: 132 - protein, 677 aa, Synthetic construct
TLNIEDEYRLHETSKEPDVSLGSTWLSDFPQAWAETGGMGLAVRQAPLIILLKATSTPVSIKQYPMRQKARLGIKPHIQRLLDQGILVPCQSPWNTPLLPVKKPGTNDYRPVQDLREVNKRVEDIHPTVPNPYNLLSGLPPSHQWYTVLDLKDAFFCLRLHPTSQPLFAFEWRDPEMGISGQLTWTRLPQGFKNSPALFNEALRRDLADFRIQHPDLILLQYVDDLLLAATSELDCQQGTRALLQTLGDLGYRASAKKAQICQKQVKYLGYLLKEGQRWLTEARKETVMGQPTPKTPRQLRKFLGKAGNCRLFIPGFAEMAAPLYPLTKPGTLFNWGPDQQKAYQEIKQALLTAPALGLPDLTKPFELFVDEKQGYAKGVLTQKLGPWRRPVAYLSKKLDPVAAGWPPCLRMVAAIAVLTKDAGKLTMGQPLVIGAPHAVEALVKQPPDRWLSKARMTHYQALLLDTDRVQFGPVVALNPATLLPLPEEGLQHNCLDILAEAHGTRPDLTDQPLPDADHTWYTGGSSLLQEGQRKAGAAVTTETEVIWAKALPAGTSAQRAELIALTQALRMAEGKKLNVYTNSRYAFATAHIQGEIYRRRGWLTSEGKEIKNKDEILALLKALFLPKRLSIIHCPGHQKGHSAEARGNRMANQAARKAAITENPDTSTLPIENSSP

SEQ ID NO: 133 - protein, 677 aa, Synthetic construct
TVSLQDEHRLFDIPVTTSLPDVWLQDFPQAWAETGGLGRAKCQAPIIIDLKPTAVPVSIKQYPMSLEAHMGIRQHIIKFLELGVLRPCRSPWNTPLLPVKKPGTQDYRPVQDLREINKRTVDIHPTVPNPYNLLSTLKPDYSWYTVLDLKDAFFCLPLAPQSQELFAFEWKDPERGISGQLTWTRLPQGFKNSPTLFNEALHRDLTDFRTQHPEVTLLQYVDDLLLAAPTKKACTQGTRHLLQELGEKGYRASAKKAQICQTKVTYLGYILSEGKRWLTPGRIETVARIPPPRNPREVREFLGKAGFCRLFIPGFAELAAPLYALTKPSTPFTWQTEHQLAFEALKKALLSAPALGLPDTSKPFTLFLDERQGIAKGVLTQKLGPWKRPVAYLSKKLDPVAAGWPPCLRIMAATAMLVKDSAKLTLGQPLTVITPHTLEAIVRQPPDRWITNARLTHYQALLLDTDRVQFGPPVTLNPATLLPVPENQPSPHDCRQVLAETHGTREDLKDQELPDADHTWYTDGSSYLDSGTRRAGAAVVDGHNTIWAQSLPPGTSAQKAELIALTKALELSKGKKANIYTDSRYAFATAHTHGSIYERRGWLTSEGKEIKNKAEIIALLKALFLPQEVAIIHCPGHQKGQDPVAVGNRQADRVARQAAMAEVLTLATEPDNTSHIT

SEQ ID NO: 134 - protein, 673 aa, Synthetic construct
LVLNLEEEYRLNEKPVPPSIDPSWLQLFPMVWAEKAGMGLANQVPPVVVELKSDASPVAVRQYPMSKEAREGIRPHIQRFLDLGILVPCQSPWNTPLLPVKKPGTNDYRPVQDLREVNKRVQDIHPTVPNPYNLLSSLPPSHTWYSVLDLKDAFFCLKLHPNSQPLFAFEWRDPEKGNTGQLTWTRLPQGFKNSPTLFNEALHRDLASFRALNPQVVMLQYVDDLLVAAPTYRDCKEGTRRLLQELSKLGYRVSAKKAQLCREEVTYLGYLLKGGKRWLTPARKATVMKIPTPTTPRQVREFLGKAGFCRLFIPGFASLAAPLYPLTRPKVPFTWTEAHQEAFGRIKEALLSAPALALPDLTKPFALYVDEKEGVARGVLTQTLGPWRRPVAYLSKKLDPVASGWPTCLKAIAAVALLLKDADKLTLGQNVLVIAPHNLESIVRQPPDRWMTNARMTHYQSLLLNERVSFAPPAILNPATLLPVESDDTPIHICSEILAEETGTRPDLRDQPLPGVPAWYTDGSSFIMDGRRQAGAAIVDNKRTVWASNLPEGTSAQKAELIALTQALRLAEGKSINIYTDSRYAFATAHVHGAIYKQRGWLTSAGKDIKNKEEILALLEAIHLPKRVAIIHCPGHQRGTDPVATGNRKADEAAKQAAQSTRILTETTKNQEH

SEQ ID NO: 135 - protein, 673 aa, Synthetic construct
TAPLEEEYRLFLEAPIQNVTLLEQWKREIPKVWAEINPPGLASTQAPIHVQLLSTALPVRVRQYPITLEAKRSLRETIRKFRAAGILRPVHSPWNTPLLPVRKSGTSEYRMVQDLREVNKRVETIHPTVPNPYTLLSLLPPDRIWYSVLDLKDAFFCIPLAPESQLIFAFEWADAEEGESGQLTWTRLPQGFKNSPTLFNEALNRDLQGFRLDHPSVSLLQYVDDLLIAADTQAACLSATRDLLMTLAELGYRVSGKKAQLCQEEVTYLGFKIHKGSRSLSNSRTQAILQIPVPKTKRQVREFLGKIGYCRLFIPGFAELAQPLYAATRGGNDPLVWGEKEEEAFQSLKLALTQPPALALPSLDKPFQLFVEETSGAAKGVLTQALGPWKRPVAYLSKRLDPVAAGWPRCLRAIAAAALLTREASKLTFGQDIEITSSHNLESLLRSPPDKWLTNARITQYQVLLLDPPRVRFKQTAALNPATLLPETDDTLPIHHCLDTLDSLTSTRPDLTDQPLAQAEATLFTDGSSYIRDGKRYAGAAVVTLDSVIWAEPLPIGTSAQKAELIALTKALEWSKDKSVNIYTDSRYAFATLHVHGMIYRERGWLTAGGKAIKNAPEILALLTAVWLPKRVAVMHCKGHQKDDAPTSTGNRRADEVAREVAIRPLSTQATIS

SEQ ID NO: 136 - protein, 673 aa, Synthetic construct
TAPLEEEYRLFLEAPIQNVTLLEQWKREIPKVWAEINPPGLASTQAPIHVQLLSTALPVRVRQYPITLEAKRSLRETIRKFRAAGILRPVHSPWNTPLLPVRKSGTSEYRMVQDLREVNKRVETIHPTVPNPYTLLSLLPPDRIWYSVLDLKDAFFCIPLAPESQLIFAFEWADAEEGESGQLTWTRLPQGFKNSPTLFNEALNRDLQGFRLDHPSVSLLQYVDDLLIAADTQAACLSATRDLLMTLAELGYRVSGKKAQLCQEEVTYLGFKIHKGSRSLSNSRTQAILQIPVPKTKRQVREFLGKIGYCRLFIPGFAELAQPLYAATRPGNDPLVWGEKEEEAFQSLKLALTQPPALALPSLDKPFQLFVEETSGAAKGVLTQALGPWKRPVAYLSKRLDPVAAGWPRCLRAIAAAALLTREASKLTFGQDIEITSSHNLESLLRSPPDKWLTNARITQYQVLLLDPPRVRFKQTAALNPATLLPETDDTLPIHHCLDTLDSLTSTRPDLTDQPLAQAEATLFTDGSSYIRDGKRYAGAAVVTLDSVIWAEPLPIGTSAQKAELIALTKALEWSKDKSVNIYTDSRYAFATLHVHGMIYRERGWLTAGGKAIKNAPEILALLTAVWLPKRVAVMHCKGHQKDDAPTSTGNRRADEVAREVAIRPLSTQATIS

SEQ ID NO: 137 - protein, 671 aa, Synthetic construct
TLNIEDEYRLHETSKGPDVPLGSTWLSDFPQAWAETGGMGLAVRQAPLIIPLRAASTPVSIKQYPMSREARLGIKPHIQRLLDQGILVPCQSPWNTPLLPVKKPGTNDYRPVQDLREVNKRVEDIHPTVPNPYNLLSGLPPSHQWYTVLDLKDAFFCLRLHPTSQSLFAFEWRDPEMGISGQLTWTRLPQGFKNSPTLFNEALHRDLADFRIQHPDLILLQYVDDLLLAATSELDCQQGTRALLQTLGDLGYRASAKKAQICQKQVKYLGYLLKEGQRWLTEARKETVMGQPTPKTPRQLREFLGKAGFCRLFIPGFAEMAAPLYPLTKPGTLFKWGPDQQKAYQEIKQALLTAPALGLPDLTKPFELFVDEKQGYAKGVLTQKLGPWRRPVAYLSKKLDPVAAGWPPCLRMVAAIAVLTKDAGKLTMGQPLVILAPHAVEALVKQPPDRWLSNARMTHYQALLLDTDRVQFGPIVTLNPATLLPLPEEGLQHDCLDILAEAHGTRPDLTDQPLPDADHTWYTDGSSFLQEGQRKAGAAVTTETEVIWAKALPAGTSAQRAELIALTQALKMAEGKKLNVYTDSRYAFATAHIHGEIYRRRGWLTSEGKEIKNKEEILALLKALFLPKRLSIIHCPGHQKGNRAEARGNRMADQAAREVATRETPETSTLL

SEQ ID NO: 138 - protein, 560 aa, Synthetic construct
PISPIETVPVKLKPGMDGPKVKQWPLTEEKIKALVEICTEMEKEGKISKIGPENPYNTPVFAIKKKDSTKWRKLVDFRELNKRTQDFWEVQLGIPHPAGLKKKKSVTVLDVGDAYFSVPLDEDFRKYTAFTIPSINNETPGIRYQYNVLPQGWKGSPAIFNSSMTKILEPFRKQNPDIVIYQYMDDLYVGSDLEIGQHRTKIEELRQHLLRWGLTTPDKKHQKEPPFLWMGYELHPDKWTVQPIVLPEKDSWTVNDIQKLVGKLNWASQFYPGIKVRQLCKLLRGTKALTEVIPLTEPAELELAENREILKEPVHGVYYDPSKDLIAEIQKQGQGQWTYQIYQEPFKNLKTGKYARMRGAHTNDVKQLTEAVQKITTESIVIWGKTPKFKLPIQKETWETWWTEYWQATWIPEWEFVNTPPLVKLWYQLEKEPIVGAETFYVDGAANRETKLGKAGYVTNRGRQKVVTLTDTTNQKTELQAIYLALQDSGLEVNIVTDSQYALGIIQAQPDQSESELVNQIIEQLIKKEKVYLAWVPAHKGIGGNEQVDKLVSAGIRKVL

SEQ ID NO: 139 - protein, 751 aa, Synthetic construct
MNPLQLLQPLPAEIKGTKLLAHWDSGATITCIPESFLEDEQPIKKTLIKTIHGEKQQNVYYVTFKVKGRKVEAEVIASPYEYILLSPTDVPWLTQQPLQLTILVPLQEYQEKILSKTALPEDQKQQLKTLFVKYDNLWQHWENQVGHRKIRPHNIATGDYPPRPQKQYPINPKAKPSIQIVIDDLLKQGVLTPQNSTMNTPVYPVPKPDGRWRMVLDYREVNKTIPLTAAQNQHSAGILATIVRQKYKTTLDLANGFWAHPITPESYWLTAFTWQGKQYCWTRLPQGFLNSPALFTADVVDLLKEIPNVQVYVDDIYLSHDDPKEHVQQLEKVFQILLQAGYVVSLKKSEIGQKTVEFLGFNITKEGRGLTDTFKTKLLNITPPKDLKQLQSILGLLNFARNFIPNFAELVQPLYNLIASAKGKYIEWSEENTKQLNMVIEALNTASNLEERLPEQRLVIKVNTSPSAGYVRYYNETGKKPIMYLNYVFSKAELKFSMLEKLLTTMHKALIKAMDLAMGQEILVYSPIVSMTKIQKTPLPERKALPIRWITWMTYLEDPRIQFHYDKTLPELKHIPDVYTSSQSPVKHPSQYEGVFYTDGSAIKSPDPTKSNNAGMGIVHATYKPEYQVLNQWSIPLGNHTAQMAEIAAVEFACKKALKIPGPVLVITDSFYVAESANKELPYWKSNGFVNNKKKPLKHISKWKSIAECLSMKPDITIQHEKGISLQIPVFILKGNALADKLATQGSYVVN

SEQ ID NO: 140 - protein, 585 aa, Synthetic construct
LTAAIDILAPQQCAEPITWKSDEPVWVDQWPLTNDKLAAAQQLVQEQLEAGHITESSSPWNTPIFVIKKKSGKWRLLQDLRAVNATMVLMGALQPGLPSPVAIPQGYLKIIIDLKDCFFSIPLHPSDQKRFAFSLPSTNFKEPMQRFQWKVLPQGMANSPTLCQKYVATAIHKVRHAWKQMYIIHYMDDILIAGKDGQQVLQCFDQLKQELTAAGLHIAPEKVQLQDPYTYLGFELNGPKITNQKAVIRKDKLQTLNDFQKLLGDINWLRPYLKLTTGDLKPLFDTLKGDSDPNSHRSLSKEALASLEKVETAIAEQFVTHINYSLPLIFLIFNTALTPTGLFWQDNPIMWIHLPASPKKVLLPYYDAIADLIILGRDHSKKYFGIEPSTIIQPYSKSQIDWLMQNTEMWPIACASFVGILDNHYPPNKLIQFCKLHTFVFPQIISKTPLNNALLVFTDGSSTGMAAYTLTDTTIKFQTNLNSAQLVELQALIAVLSAFPNQPLNIYTDSAYLAHSIPLLETVAQIKHISETAKLFLQCQQLIYNRSIPFYIGHVRAHSGLPGPIAQGNQRADLATKIVASNINT

SEQ ID NO: 141 - protein, 577 aa, Synthetic construct
MIGAIESNLFADQISWKSDQPVWLNQWPLKQEKLQALQQLVTEQLQLGHLEESNSPWNTPVFVIKKKSGKWRLLQDLRAVNATMHDMGALQPGLPSPVAVPKGWEIIIIDLQDCFFNIKLHPEDCKRFAFSVPSPNFKRPYQRFQWKVLPQGMKNSPTLCQKFVDKAILTVRDKYQDSYIVHYMDDILLAHPSRSIVDEILTSMIQALNKHGLVVSTEKIQKYDNLKYLGTHIQGDAVSYQKLQIRTDKLRTLNDFQKLLGNINWIRPFLKLTTGELKPLFEILNGDSNPISIRKLTPEACKALQLVNERLSIARVKRLDLSRPWSLCILKTEYTPTACLWQNGVLEWIHLPHISPKVITPYDIFCTQLIIKGRHRSKELFSKDPDYIVVPYTKVQFDLLLQEKEDWPISLLGFLGEVHFHLPKDPLLTFTLQTAIIFPHMTSTTPLEKGIVIFTDGSANGRSVTYIQGREPIIKENTQNTAQQAEIVAVITAFEEVSQSFNLYTDSKYVTGLFPEIETATLSPRTKIYTELRHLQRLIHKRQEKFYIGHIRGHTGLPGPLAQGNAYADSLTRILTA

SEQ ID NO: 142 - protein, 751 aa, Synthetic construct
MNPLQLLQPLPAEIKGTKLLAHWDSGATITCIPESFLEDEQPIKKTLIKTIHGEKQQNVYYVTFKVKGRKVEAEVIASPYEYILLSPTDVPWLTQQPLQLTILVPLQEYQEKILSKTALPEDQKQQLKTLFVKYDNLWQHWENQVGHRKIRPHNIATGDYPPRPQKQYPINPKAKPSIQIVIDDLLKQGVLTPQNSTMNTPVYPVPKPDGRWRMVLDYREVNKTIPLTAAQNQHSAGILATIVRQKYKTTLDLANGFWAHPITPESYWLTAFTWQGKQYCWTRLPQGFLNSPALFNADVVDLLKEIPNVQVYVDDIYLSHDDPKEHVQQLEKVFQILLQAGYVVSLKKSEIGQKTVEFLGFNITKEGRGLTDTFKTKLLNITPPKDLKQLQSILGKLNFARNFIPNFAELVQPLYNLIASAKPKYIEWSEENTKQLNMVIEALNTASNLEERLPEQRLVIKVNTSPSAGYVRYYNETGKKPIMYLNYVFSKAELKFSMLEKLLTTMHKALIKAMDLAMGQEILVYSPIVSMTKIQKTPLPERKALPIRWITWMTYLEDPRIQFHYDKTLPELKHIPDVYTSSQSPVKHPSQYEGVFYTDGSAIKSPDPTKSNNAGMGIVHATYKPEYQVLNQWSIPLGNHTAQMAEIAAVEFACKKALKIPGPVLVITDSFYVAESANKELPYWKSNGFVNNKKKPLKHISKWKSIAECLSMKPDITIQHEKGISLQIPVFILKGNALADKLATQGSYVVN

SEQ ID NO: 143 - protein, 751 aa, Synthetic construct
MNPLQLLQPLPAEIKGTKLLAHWDSGATITCIPESFLEDEQPIKKTLIKTIHGEKQQNVYYVTFKVKGRKVEAEVIASPYEYILLSPTDVPWLTQQPLQLTILVPLQEYQEKILSKTALPEDQKQQLKTLFVKYDNLWQHWENQVGHRKIRPHNIATGDYPPRPQKQYPINPKAKPSIQIVIDDLLKQGVLTPQNSTMNTPVYPVPKPDGRWRMVLDYREVNKTIPLTAAQNQHSAGILATIVRQKYKTTLDLANGFWAHPITPESYWLTAFTWQGKQYCWTRLPQGFLNSPALFNADVVDLLKEIPNVQVYVDDIYLSHDDPKEHVQQLEKVFQILLQAGYVVSLKKSEIGQKTVEFLGFNITKEGRGLTDTFKTKLLNITPPKDLKQLQSILGKLNFARNFIPNFAELVQPLYNLIASAKGPYIEWSEENTKQLNMVIEALNTASNLEERLPEQRLVIKVNTSPSAGYVRYYNETGKKPIMYLNYVFSKAELKFSMLEKLLTTMHKALIKAMDLAMGQEILVYSPIVSMTKIQKTPLPERKALPIRWITWMTYLEDPRIQFHYDKTLPELKHIPDVYTSSQSPVKHPSQYEGVFYTDGSAIKSPDPTKSNNAGMGIVHATYKPEYQVLNQWSIPLGNHTAQMAEIAAVEFACKKALKIPGPVLVITDSFYVAESANKELPYWKSNGFVNNKKKPLKHISKWKSIAECLSMKPDITIQHEKGISLQIPVFILKGNALADKLATQGSYVVN

SEQ ID NO: 144 - protein, 585 aa, Synthetic construct
LTAAIDILAPQQCAEPITWKSDEPVWVDQWPLTNDKLAAAQQLVQEQLEAGHITESSSPWNTPIFVIKKKSGKWRLLQDLRAVNATMVLMGALQPGLPSPVAIPQGYLKIIIDLKDCFFSIPLHPSDQKRFAFSLPSTNFKEPMQRFQWKVLPQGMANSPTLCQKYVATAIHKVRHAWKQMYIIHYMDDILIAGKDGQQVLQCFDQLKQELTAAGLHIAPEKVQLQDPYTYLGFELNGPKITNQKAVIRKDKLQTLNDFQKLLGKINWLRPFLKLTTGDLKPLFDTLKGDSDPNSHRSLSKEALASLEKVETAIAEQFVTHINYSLPLIFLIFNTALTPTGLFWQDNPIMWIHLPASPKKVLLPYYDAIADLIILGRDHSKKYFGIEPSTIIQPYSKSQIDWLMQNTEMWPIACASFVGILDNHYPPNKLIQFCKLHTFVFPQIISKTPLNNALLVFTDGSSTGMAAYTLTDTTIKFQTNLNSAQLVELQALIAVLSAFPNQPLNIYTDSAYLAHSIPLLETVAQIKHISETAKLFLQCQQLIYNRSIPFYIGHVRAHSGLPGPIAQGNQRADLATKIVASNINT

SEQ ID NO: 145 - protein, 585 aa, Synthetic construct
LTAAIDILAPQQCAEPITWKSDEPVWVDQWPLTNDKLAAAQQLVQEQLEAGHITESSSPWNTPIFVIKKKSGKWRLLQDLRAVNATMVLMGALQPGLPSPVAIPQGYLKIIIDLKDCFFSIPLHPSDQKRFAFSLPSTNFKEPMQRFQWKVLPQGMANSPTLCNKYVATAIHKVRHAWKQMYIIHYMDDILIAGKDGQQVLQCFDQLKQELTAAGLHIAPEKVQLQDPYTYLGFELNGPKITNQKAVIRKDKLQTLNDFQKLLGKINWLRPFLKLTTGDLKPLFDTLKGDSDPNSHRSLSKEALASLEKVETAIAEQFVTHINYSLPLIFLIFNTALTPTGLFWQDNPIMWIHLPASPKKVLLPYYDAIADLIILGRDHSKKYFGIEPSTIIQPYSKSQIDWLMQNTEMWPIACASFVGILDNHYPPNKLIQFCKLHTFVFPQIISKTPLNNALLVFTDGSSTGMAAYTLTDTTIKFQTNLNSAQLVELQALIAVLSAFPNQPLNIYTDSAYLAHSIPLLETVAQIKHISETAKLFLQCQQLIYNRSIPFYIGHVRAHSGLPGPIAQGNQRADLATKIVASNINT

SEQ ID NO: 146 - protein, 585 aa, Synthetic construct
LTAAIDILAPQQCAEPITWKSDEPVWVDQWPLTNDKLAAAQQLVQEQLEAGHITESSSPWNTPIFVIKKKSGKWRLLQDLRAVNATMVLMGALQPGLPSPVAIPQGYLKIIIDLKDCFFSIPLHPSDQKRFAFSLPSTNFKEPMQRFQWKVLPQGMANSPTLCQKYVATAIHKVRHAWKQMYIIHYMDDILIAGKDGQQVLQCFDQLKQELTAAGLHIAPEKVQLQDPYTYLGFELNGPKITNQKAVIRKDKLQTLNDFQKLLGKINWLRPFLKLTTGDLKPLFDTLKPDSDPNSHRSLSKEALASLEKVETAIAEQFVTHINYSLPLIFLIFNTALTPTGLFWQDNPIMWIHLPASPKKVLLPYYDAIADLIILGRDHSKKYFGIEPSTIIQPYSKSQIDWLMQNTEMWPIACASFVGILDNHYPPNKLIQFCKLHTFVFPQIISKTPLNNALLVFTDGSSTGMAAYTLTDTTIKFQTNLNSAQLVELQALIAVLSAFPNQPLNIYTDSAYLAHSIPLLETVAQIKHISETAKLFLQCQQLIYNRSIPFYIGHVRAHSGLPGPIAQGNQRADLATKIVASNINT

SEQ ID NO: 147 - protein, 585 aa, Synthetic construct
LTAAIDILAPQQCAEPITWKSDEPVWVDQWPLTNDKLAAAQQLVQEQLEAGHITESSSPWNTPIFVIKKKSGKWRLLQDLRAVNATMVLMGALQPGLPSPVAIPQGYLKIIIDLKDCFFSIPLHPSDQKRFAFSLPSTNFKEPMQRFQWKVLPQGMANSPTLCQKYVATAIHKVRHAWKQMYIIHYMDDILIAGKDGQQVLQCFDQLKQELTAAGLHIAPEKVQLQDPYTYLGFELNGPKITNQKAVIRKDKLQTLNDFQKLLGKINWLRPFLKLTTGDLKPLFDTLKGDPDPNSHRSLSKEALASLEKVETAIAEQFVTHINYSLPLIFLIFNTALTPTGLFWQDNPIMWIHLPASPKKVLLPYYDAIADLIILGRDHSKKYFGIEPSTIIQPYSKSQIDWLMQNTEMWPIACASFVGILDNHYPPNKLIQFCKLHTFVFPQIISKTPLNNALLVFTDGSSTGMAAYTLTDTTIKFQTNLNSAQLVELQALIAVLSAFPNQPLNIYTDSAYLAHSIPLLETVAQIKHISETAKLFLQCQQLIYNRSIPFYIGHVRAHSGLPGPIAQGNQRADLATKIVASNINT

SEQ ID NO: 148 - protein, 585 aa, Synthetic construct
LTAAIDILAPQQCAEPITWKSDEPVWVDQWPLTNDKLAAAQQLVQEQLEAGHITESSSPWNTPIFVIKKKSGKWRLLQDLRAVNATMVLMGALQPGLPSPVAIPQGYLKIIIDLKDCFFSIPLHPSDQKRFAFSLPSTNFKEPMQRFQWKVLPQGMANSPTLCQKYVATAIHKVRHAWKQMYIIHYMDDILIAGKDGQQVLQCFDQLKQELTAAGLHIAPEKVQLQDPYTYLGFELNGPKITNQKAVIRKDKLQTLNDFQKLLGKINWLRPFLKLTTGDLKPLFDTLKGDSDPNSHRSLSKEALASLEKVETAIAEQFVTHINYSLPLIFLIFNTALTPTGLFWQDNPIMWIHLPASPKKVLLPYYDAIADLIILGRDHSKKYFGIEPSTIIQPYSKSQIDWLMQNTEMWPIACASFVGILDNHYPPNKLIQFCKLHTFVFPQIISKTPLNNALLVFTDGSSTGMAAYTLTDTTIKFQTNLNSAQLVELQALIAVLSAFPNQPLNIYTDSAYLAHSIPLLETVAQIKHISEWAKLFLQCQQLIYNRSIPFYIGHVRAHSGLPGPIAQGNQRADLATKIVASNINT

SEQ ID NO: 149 - protein, 585 aa, Synthetic construct
LTAAIDILAPQQCAEPITWKSDEPVWVDQWPLTNDKLAAAQQLVQEQLEAGHITESSSPWNTPIFVIKKKSGKWRLLQDLRAVNATMVLMGALQPGLPSPVAIPQGYLKIIIDLKDCFFSIPLHPSDQKRFAFSLPSTNFKEPMQRFQWKVLPQGMANSPTLCQKYVATAIHKVRHAWKQMYIIHYMDDILIAGKDGQQVLQCFDQLKQELTAAGLHIAPEKVQLQDPYTYLGFELNGPKITNQKAVIRKDKLQTLNDFQKLLGKINWLRPFLKLTTGDLKPLFDTLKGDSDPNSHRSLSKEALASLEKVETAIAEQFVTHINYSLPLIFLIFNTALTPTGLFWQDNPIMWIHLPASPKKVLLPYYDAIADLIILGRDHSKKYFGIEPSTIIQPYSKSQIDWLMQNTEMWPIACASFVGILDNHYPPNKLIQFCKLHTFVFPQIISKTPLNNALLVFTDGSSTGMAAYTLTDTTIKFQTNLNSAQLVELQALIAVLSAFPNQPLNIYTDSAYLAHSIPLLETVAQIKHISETAKWFLQCQQLIYNRSIPFYIGHVRAHSGLPGPIAQGNQRADLATKIVASNINT

SEQ ID NO: 150 - protein, 585 aa, Synthetic construct
LTAAIDILAPQQCAEPITWKSDEPVWVDQWPLTNDKLAAAQQLVQEQLEAGHITESSSPWNTPIFVIKKKSGKWRLLQDLRAVNATMVLMGALQPGLPSPVAIPQGYLKIIIDLKDCFFSIPLHPSDQKRFAFSLPSTNFKEPMQRFQWKVLPQGMANSPTLCNKYVATAIHKVRHAWKQMYIIHYMDDILIAGKDGQQVLQCFDQLKQELTAAGLHIAPEKVQLQDPYTYLGFELNGPKITNQKAVIRKDKLQTLNDFQKLLGKINWLRPFLKLTTGDLKPLFDTLKPDSDPNSHRSLSKEALASLEKVETAIAEQFVTHINYSLPLIFLIFNTALTPTGLFWQDNPIMWIHLPASPKKVLLPYYDAIADLIILGRDHSKKYFGIEPSTIIQPYSKSQIDWLMQNTEMWPIACASFVGILDNHYPPNKLIQFCKLHTFVFPQIISKTPLNNALLVFTDGSSTGMAAYTLTDTTIKFQTNLNSAQLVELQALIAVLSAFPNQPLNIYTDSAYLAHSIPLLETVAQIKHISETAKLFLQCQQLIYNRSIPFYIGHVRAHSGLPGPIAQGNQRADLATKIVASNINT

SEQ ID NO: 151 - protein, 585 aa, Synthetic construct
LTAAIDILAPQQCAEPITWKSDEPVWVDQWPLTNDKLAAAQQLVQEQLEAGHITESSSPWNTPIFVIKKKSGKWRLLQDLRAVNATMVLMGALQPGLPSPVAIPQGYLKIIIDLKDCFFSIPLHPSDQKRFAFSLPSTNFKEPMQRFQWKVLPQGMANSPTLCNKYVATAIHKVRHAWKQMYIIHYMDDILIAGKDGQQVLQCFDQLKQELTAAGLHIAPEKVQLQDPYTYLGFELNGPKITNQKAVIRKDKLQTLNDFQKLLGKINWLRPFLKLTTGDLKPLFDTLKGDPDPNSHRSLSKEALASLEKVETAIAEQFVTHINYSLPLIFLIFNTALTPTGLFWQDNPIMWIHLPASPKKVLLPYYDAIADLIILGRDHSKKYFGIEPSTIIQPYSKSQIDWLMQNTEMWPIACASFVGILDNHYPPNKLIQFCKLHTFVFPQIISKTPLNNALLVFTDGSSTGMAAYTLTDTTIKFQTNLNSAQLVELQALIAVLSAFPNQPLNIYTDSAYLAHSIPLLETVAQIKHISETAKLFLQCQQLIYNRSIPFYIGHVRAHSGLPGPIAQGNQRADLATKIVASNINT

SEQ ID NO: 152 - protein, 585 aa, Synthetic construct
LTAAIDILAPQQCAEPITWKSDEPVWVDQWPLTNDKLAAAQQLVQEQLEAGHITESSSPWNTPIFVIKKKSGKWRLLQDLRAVNATMVLMGALQPGLPSPVAIPQGYLKIIIDLKDCFFSIPLHPSDQKRFAFSLPSTNFKEPMQRFQWKVLPQGMANSPTLCNKYVATAIHKVRHAWKQMYIIHYMDDILIAGKDGQQVLQCFDQLKQELTAAGLHIAPEKVQLQDPYTYLGFELNGPKITNQKAVIRKDKLQTLNDFQKLLGKINWLRPFLKLTTGDLKPLFDTLKGDSDPNSHRSLSKEALASLEKVETAIAEQFVTHINYSLPLIFLIFNTALTPTGLFWQDNPIMWIHLPASPKKVLLPYYDAIADLIILGRDHSKKYFGIEPSTIIQPYSKSQIDWLMQNTEMWPIACASFVGILDNHYPPNKLIQFCKLHTFVFPQIISKTPLNNALLVFTDGSSTGMAAYTLTDTTIKFQTNLNSAQLVELQALIAVLSAFPNQPLNIYTDSAYLAHSIPLLETVAQIKHISEWAKLFLQCQQLIYNRSIPFYIGHVRAHSGLPGPIAQGNQRADLATKIVASNINT

SEQ ID NO: 153 - protein, 585 aa, Synthetic construct
LTAAIDILAPQQCAEPITWKSDEPVWVDQWPLTNDKLAAAQQLVQEQLEAGHITESSSPWNTPIFVIKKKSGKWRLLQDLRAVNATMVLMGALQPGLPSPVAIPQGYLKIIIDLKDCFFSIPLHPSDQKRFAFSLPSTNFKEPMQRFQWKVLPQGMANSPTLCNKYVATAIHKVRHAWKQMYIIHYMDDILIAGKDGQQVLQCFDQLKQELTAAGLHIAPEKVQLQDPYTYLGFELNGPKITNQKAVIRKDKLQTLNDFQKLLGKINWLRPFLKLTTGDLKPLFDTLKGDSDPNSHRSLSKEALASLEKVETAIAEQFVTHINYSLPLIFLIFNTALTPTGLFWQDNPIMWIHLPASPKKVLLPYYDAIADLIILGRDHSKKYFGIEPSTIIQPYSKSQIDWLMQNTEMWPIACASFVGILDNHYPPNKLIQFCKLHTFVFPQIISKTPLNNALLVFTDGSSTGMAAYTLTDTTIKFQTNLNSAQLVELQALIAVLSAFPNQPLNIYTDSAYLAHSIPLLETVAQIKHISETAKWFLQCQQLIYNRSIPFYIGHVRAHSGLPGPIAQGNQRADLATKIVASNINT

SEQ ID NO: 154 - protein, 585 aa, Synthetic construct
LTAAIDILAPQQCAEPITWKSDEPVWVDQWPLTNDKLAAAQQLVQEQLEAGHITESSSPWNTPIFVIKKKSGKWRLLQDLRAVNATMVLMGALQPGLPSPVAIPQGYLKIIIDLKDCFFSIPLHPSDQKRFAFSLPSTNFKEPMQRFQWKVLPQGMANSPTLCNKYVATAIHKVRHAWKQMYIIHYMDDILIAGKDGQQVLQCFDQLKQELTAAGLHIAPEKVQLQDPYTYLGFELNGPKITNQKAVIRKDKLQTLNDFQKLLGKINWLRPFLKLTTGDLKPLFDTLKPDSDPNSHRSLSKEALASLEKVETAIAEQFVTHINYSLPLIFLIFNTALTPTGLFWQDNPIMWIHLPASPKKVLLPYYDAIADLIILGRDHSKKYFGIEPSTIIQPYSKSQIDWLMQNTEMWPIACASFVGILDNHYPPNKLIQFCKLHTFVFPQIISKTPLNNALLVFTDGSSTGMAAYTLTDTTIKFQTNLNSAQLVELQALIAVLSAFPNQPLNIYTDSAYLAHSIPLLETVAQIKHISEWAKLFLQCQQLIYNRSIPFYIGHVRAHSGLPGPIAQGNQRADLATKIVASNINT

SEQ ID NO: 155 - protein, 585 aa, Synthetic construct
LTAAIDILAPQQCAEPITWKSDEPVWVDQWPLTNDKLAAAQQLVQEQLEAGHITESSSPWNTPIFVIKKKSGKWRLLQDLRAVNATMVLMGALQPGLPSPVAIPQGYLKIIIDLKDCFFSIPLHPSDQKRFAFSLPSTNFKEPMQRFQWKVLPQGMANSPTLCNKYVATAIHKVRHAWKQMYIIHYMDDILIAGKDGQQVLQCFDQLKQELTAAGLHIAPEKVQLQDPYTYLGFELNGPKITNQKAVIRKDKLQTLNDFQKLLGKINWLRPFLKLTTGDLKPLFDTLKPDSDPNSHRSLSKEALASLEKVETAIAEQFVTHINYSLPLIFLIFNTALTPTGLFWQDNPIMWIHLPASPKKVLLPYYDAIADLIILGRDHSKKYFGIEPSTIIQPYSKSQIDWLMQNTEMWPIACASFVGILDNHYPPNKLIQFCKLHTFVFPQIISKTPLNNALLVFTDGSSTGMAAYTLTDTTIKFQTNLNSAQLVELQALIAVLSAFPNQPLNIYTDSAYLAHSIPLLETVAQIKHISETAKWFLQCQQLIYNRSIPFYIGHVRAHSGLPGPIAQGNQRADLATKIVASNINT

SEQ ID NO: 156 - protein, 585 aa, Synthetic construct
LTAAIDILAPQQCAEPITWKSDEPVWVDQWPLTNDKLAAAQQLVQEQLEAGHITESSSPWNTPIFVIKKKSGKWRLLQDLRAVNATMVLMGALQPGLPSPVAIPQGYLKIIIDLKDCFFSIPLHPSDQKRFAFSLPSTNFKEPMQRFQWKVLPQGMANSPTLCNKYVATAIHKVRHAWKQMYIIHYMDDILIAGKDGQQVLQCFDQLKQELTAAGLHIAPEKVQLQDPYTYLGFELNGPKITNQKAVIRKDKLQTLNDFQKLLGKINWLRPFLKLTTGDLKPLFDTLKGDPDPNSHRSLSKEALASLEKVETAIAEQFVTHINYSLPLIFLIFNTALTPTGLFWQDNPIMWIHLPASPKKVLLPYYDAIADLIILGRDHSKKYFGIEPSTIIQPYSKSQIDWLMQNTEMWPIACASFVGILDNHYPPNKLIQFCKLHTFVFPQIISKTPLNNALLVFTDGSSTGMAAYTLTDTTIKFQTNLNSAQLVELQALIAVLSAFPNQPLNIYTDSAYLAHSIPLLETVAQIKHISEWAKLFLQCQQLIYNRSIPFYIGHVRAHSGLPGPIAQGNQRADLATKIVASNINT

SEQ ID NO: 157 - protein, 585 aa, Synthetic construct
LTAAIDILAPQQCAEPITWKSDEPVWVDQWPLTNDKLAAAQQLVQEQLEAGHITESSSPWNTPIFVIKKKSGKWRLLQDLRAVNATMVLMGALQPGLPSPVAIPQGYLKIIIDLKDCFFSIPLHPSDQKRFAFSLPSTNFKEPMQRFQWKVLPQGMANSPTLCNKYVATAIHKVRHAWKQMYIIHYMDDILIAGKDGQQVLQCFDQLKQELTAAGLHIAPEKVQLQDPYTYLGFELNGPKITNQKAVIRKDKLQTLNDFQKLLGKINWLRPFLKLTTGDLKPLFDTLKGDPDPNSHRSLSKEALASLEKVETAIAEQFVTHINYSLPLIFLIFNTALTPTGLFWQDNPIMWIHLPASPKKVLLPYYDAIADLIILGRDHSKKYFGIEPSTIIQPYSKSQIDWLMQNTEMWPIACASFVGILDNHYPPNKLIQFCKLHTFVFPQIISKTPLNNALLVFTDGSSTGMAAYTLTDTTIKFQTNLNSAQLVELQALIAVLSAFPNQPLNIYTDSAYLAHSIPLLETVAQIKHISETAKWFLQCQQLIYNRSIPFYIGHVRAHSGLPGPIAQGNQRADLATKIVASNINT

SEQ ID NO: 158 - protein, 577 aa, Synthetic construct
MIGAIESNLFADQISWKSDQPVWLNQWPLKQEKLQALQQLVTEQLQLGHLEESNSPWNTPVFVIKKKSGKWRLLQDLRAVNATMHDMGALQPGLPSPVAVPKGWEIIIIDLQDCFFNIKLHPEDCKRFAFSVPSPNFKRPYQRFQWKVLPQGMKNSPTLCNKFVDKAILTVRDKYQDSYIVHYMDDILLAHPSRSIVDEILTSMIQALNKHGLVVSTEKIQKYDNLKYLGTHIQGDAVSYQKLQIRTDKLRTLNDFQKLLGKINWIRPFLKLTTGELKPLFEILNGDSNPISIRKLTPEACKALQLVNERLSIARVKRLDLSRPWSLCILKTEYTPTACLWQNGVLEWIHLPHISPKVITPYDIFCTQLIIKGRHRSKELFSKDPDYIVVPYTKVQFDLLLQEKEDWPISLLGFLGEVHFHLPKDPLLTFTLQTAIIFPHMTSTTPLEKGIVIFTDGSANGRSVTYIQGREPIIKENTQNTAQQAEIVAVITAFEEVSQSFNLYTDSKYVTGLFPEIETATLSPRTKIYTELRHLQRLIHKRQEKFYIGHIRGHTGLPGPLAQGNAYADSLTRILTA

SEQ ID NO: 159 - protein, 577 aa, Synthetic construct
MIGAIESNLFADQISWKSDQPVWLNQWPLKQEKLQALQQLVTEQLQLGHLEESNSPWNTPVFVIKKKSGKWRLLQDLRAVNATMHDMGALQPGLPSPVAVPKGWEIIIIDLQDCFFNIKLHPEDCKRFAFSVPSPNFKRPYQRFQWKVLPQGMKNSPTLCNKFVDKAILTVRDKYQDSYIVHYMDDILLAHPSRSIVDEILTSMIQALNKHGLVVSTEKIQKYDNLKYLGTHIQGDAVSYQKLQIRTDKLRTLNDFQKLLGKINWIRPFLKLTTGELKPLFEILNGDSNPISIRKLTPEACKALQLVNERLSIARVKRLDLSRPWSLCILKTEYTPTACLWQNGVLEWIHLPHISPKVITPYDIFCTQLIIKGRHRSKELFSKDPDYIVVPYTKVQFDLLLQEKEDWPISLLGFLGEVHFHLPKDPLLTFTLQTAIIFPHMTSTTPLEKGIVIFTDGSANGRSVTYIQGREPIIKENTQNTAQQAEIVAVITAFEEVSQSFNLYTDSKYVTGLFPEIETATLSPRTKWYTELRHLQRLIHKRQEKFYIGHIRGHTGLPGPLAQGNAYADSLTRILTA

SEQ ID NO: 160 - protein, 496 aa, Synthetic construct
TLNIEDEHRLHETSKEPDVSLGSTWLSDFPQAWAETGGMGLAVRQAPLIIPLKATSTPVSIKQYPMSQEARLGIKPHIQRLLDQGILVPCQSPWNTPLLPVKKPGTNDYRPVQDLREVNKRVEDIHPTVPNPYNLLSGLPPSHQWYTVLDLKDAFFCLRLHPTSQPLFAFEWRDPEMGISGQLTWTRLPQGFKNSPTLFNEALHRDLADFRIQHPDLILLQYVDDLLLAATSELDCQQGTRALLQTLGNLGYRASAKKAQICQKQVKYLGYLLKEGQRWLTEARKETVMGQPTPKTPRQLREFLGKAGFCRLFIPGFAEMAAPLYPLTKPGTLFNWGPDQQKAYQEIKQALLTAPALGLPDLTKPFELFVDEKQGYAKGVLTQKLGPWRRPVAYLSKKLDPVAAGWPPCLRMVAAIAVLTKDAGKLTMGQPLVILAPHAVEALVKQPPDRWLSNARMTHYQALLLDTDRVQFGPVVALNPATLLPLPEEGLQHNCL

SEQ ID NO: 161 - protein, 496 aa, Synthetic construct
TLNIEDEYRLHETSKEPDVSLGSTWLSDFPQAWAETGGMGLAVRQAPLIILLKATSTPVSIKQYPMRQKARLGIKPHIQRLLDQGILVPCQSPWNTPLLPVKKPGTNDYRPVQDLREVNKRVEDIHPTVPNPYNLLSGLPPSHQWYTVLDLKDAFFCLRLHPTSQPLFAFEWRDPEMGISGQLTWTRLPQGFKNSPALFDEALRRDLADFRIQHPDLILLQYVDDLLLAATSELDCQQGTRALLQTLGDLGYRASAKKAQICQKQVKYLGYLLKEGQRWLTEARKETVMGQPTPKTPRQLRKFLGTAGNCRLFIPGFAEMAAPLYPLTKPGTLFNWGPDQQKAYQEIKQALLTAPALGLPDLTKPFELFVDEKQGYAKGVLTQKLGPWRRPVAYLSKKLDPVAAGWPPCLRMVAAIAVLTKDAGKLTMGQPLVIGAPHAVEALVKQPPDRWLSKARMTHYQALLLDTDRVQFGPVVALNPATLLPLPEEGLQHNCL

SEQ ID NO: 162 - protein, 496 aa, Synthetic construct
TVSLQDEHRLFDIPVTTSLPDVWLQDFPQAWAETGGLGRAKCQAPIIIDLKPTAVPVSIKQYPMSLEAHMGIRQHIIKFLELGVLRPCRSPWNTPLLPVKKPGTQDYRPVQDLREINKRTVDIHPTVPNPYNLLSTLKPDYSWYTVLDLKDAFFCLPLAPQSQELFAFEWKDPERGISGQLTWTRLPQGFKNSPTLFDEALHRDLTDFRTQHPEVTLLQYVDDLLLAAPTKKACTQGTRHLLQELGEKGYRASAKKAQICQTKVTYLGYILSEGKRWLTPGRIETVARIPPPRNPREVREFLGTAGFCRLWIPGFAELAAPLYALTKESTPFTWQTEHQLAFEALKKALLSAPALGLPDTSKPFTLFLDERQGIAKGVLTQKLGPWKRPVAYLSKKLDPVAAGWPPCLRIMAATAMLVKDSAKLTLGQPLTVITPHTLEAIVRQPPDRWITNARLTHYQALLLDTDRVQFGPPVTLNPATLLPVPENQPSPHDCRQ

SEQ ID NO: 163 - protein, 496 aa, Synthetic construct
LVLNLEEEYRLNEKPVPPSIDPSWLQLFPMVWAEKAGMGLANQVPPVVVELKSDASPVAVRQYPMSKEAREGIRPHIQRFLDLGILVPCQSPWNTPLLPVKKPGTNDYRPVQDLREVNKRVQDIHPTVPNPYNLLSSLPPSHTWYSVLDLKDAFFCLKLHPNSQPLFAFEWRDPEKGNTGQLTWTRLPQGFKNSPTLFDEALHRDLASFRALNPQVVMLQYVDDLLVAAPTYRDCKEGTRRLLQELSKLGYRVSAKKAQLCREEVTYLGYLLKGGKRWLTPARKATVMKIPTPTTPRQVREFLGTAGFCRLWIPGFASLAAPLYPLTREKVPFTWTEAHQEAFGRIKEALLSAPALALPDLTKPFALYVDEKEGVARGVLTQTLGPWRRPVAYLSKKLDPVASGWPTCLKAIAAVALLLKDADKLTLGQNVLVIAPHNLESIVRQPPDRWMTNARMTHYQSLLLNERVSFAPPAILNPATLLPVESDDTPIHICSE

SEQ ID NO: 164 - protein, 496 aa, Synthetic construct
TLNIEDEYRLHETSKGPDVPLGSTWLSDFPQAWAETGGMGLAVRQAPLIIPLRAASTPVSIKQYPMSREARLGIKPHIQRLLDQGILVPCQSPWNTPLLPVKKPGTNDYRPVQDLREVNKRVEDIHPTVPNPYNLLSGLPPSHQWYTVLDLKDAFFCLRLHPTSQSLFAFEWRDPEMGISGQLTWTRLPQGFKNSPTLFDEALHRDLADFRIQHPDLILLQYVDDLLLAATSELDCQQGTRALLQTLGDLGYRASAKKAQICQKQVKYLGYLLKEGQRWLTEARKETVMGQPTPKTPRQLREFLGTAGFCRLWIPGFAEMAAPLYPLTKTGTLFKWGPDQQKAYQEIKQALLTAPALGLPDLTKPFELFVDEKQGYAKGVLTQKLGPWRRPVAYLSKKLDPVAAGWPPCLRMVAAIAVLTKDAGKLTMGQPLVILAPHAVEALVKQPPDRWLSNARMTHYQALLLDTDRVQFGPIVTLNPATLLPLPEEGLQHDCL

SEQ ID NO: 165 - protein, 499 aa, Synthetic construct
TAPLEEEYRLFLEAPIQNVTLLEQWKREIPKVWAEINPPGLASTQAPIHVQLLSTALPVRVRQYPITLEAKRSLRETIRKFRAAGILRPVHSPWNTPLLPVRKSGTSEYRMVQDLREVNKRVETIHPTVPNPYTLLSLLPPDRIWYSVLDLKDAFFCIPLAPESQLIFAFEWADAEEGESGQLTWTRLPQGFKNSPTLFDEALNRDLQGFRLDHPSVSLLQYVDDLLIAADTQAACLSATRDLLMTLAELGYRVSGKKAQLCQEEVTYLGFKIHKGSRSLSNSRTQAILQIPVPKTKRQVREFLGTIGYCRLWIPGFAELAQPLYAATRGGNDPLVWGEKEEEAFQSLKLALTQPPALALPSLDKPFQLFVEETSGAAKGVLTQALGPWKRPVAYLSKRLDPVAAGWPRCLRAIAAAALLTREASKLTFGQDIEITSSHNLESLLRSPPDKWLTNARITQYQVLLLDPPRVRFKQTAALNPATLLPETDDTLPIHHCLD

SEQ ID NO: 166 - protein, 428 aa, Synthetic construct
PISPIETVPVKLKPGMDGPKVKQWPLTEEKIKALVEICTEMEKEGKISKIGPENPYNTPVFAIKKKDSTKWRKLVDFRELNKRTQDFWEVQLGIPHPAGLKKKKSVTVLDVGDAYFSVPLDEDFRKYTAFTIPSINNETPGIRYQYNVLPQGWKGSPAIFQSSMTKILEPFRKQNPDIVIYQYMDDLYVGSDLEIGQHRTKIEELRQHLLRWGLTTPDKKHQKEPPFLWMGYELHPDKWTVQPIVLPEKDSWTVNDIQKLVGKLNWASQIYPGIKVRQLCKLLRGTKALTEVIPLTEEAELELAENREILKEPVHGVYYDPSKDLIAEIQKQGQGQWTYQIYQEPFKNLKTGKYARMRGAHTNDVKQLTEAVQKITTESIVIWGKTPKFKLPIQKETWETWWTEYWQATWIPEWEFVNTPPLVKLWYQ

SEQ ID NO: 167 - protein, 574 aa, Synthetic construct
MNPLQLLQPLPAEIKGTKLLAHWDSGATITCIPESFLEDEQPIKKTLIKTIHGEKQQNVYYVTFKVKGRKVEAEVIASPYEYILLSPTDVPWLTQQPLQLTILVPLQEYQEKILSKTALPEDQKQQLKTLFVKYDNLWQHWENQVGHRKIRPHNIATGDYPPRPQKQYPINPKAKPSIQIVIDDLLKQGVLTPQNSTMNTPVYPVPKPDGRWRMVLDYREVNKTIPLTAAQNQHSAGILATIVRQKYKTTLDLANGFWAHPITPESYWLTAFTWQGKQYCWTRLPQGFLNSPALFTADVVDLLKEIPNVQVYVDDIYLSHDDPKEHVQQLEKVFQILLQAGYVVSLKKSEIGQKTVEFLGFNITKEGRGLTDTFKTKLLNITPPKDLKQLQSILGLLNFARNFIPNFAELVQPLYNLIASAKGKYIEWSEENTKQLNMVIEALNTASNLEERLPEQRLVIKVNTSPSAGYVRYYNETGKKPIMYLNYVFSKAELKFSMLEKLLTTMHKALIKAMDLAMGQEILVYSPIVSMTKIQKTPLPERKALPIRWITWMTYLEDPRIQFHYDKTLPELKH

SEQ ID NO: 168 - protein, 439 aa, Synthetic construct
LTAAIDILAPQQCAEPITWKSDEPVWVDQWPLTNDKLAAAQQLVQEQLEAGHITESSSPWNTPIFVIKKKSGKWRLLQDLRAVNATMVLMGALQPGLPSPVAIPQGYLKIIIDLKDCFFSIPLHPSDQKRFAFSLPSTNFKEPMQRFQWKVLPQGMANSPTLCQKYVATAIHKVRHAWKQMYIIHYMDDILIAGKDGQQVLQCFDQLKQELTAAGLHIAPEKVQLQDPYTYLGFELNGPKITNQKAVIRKDKLQTLNDFQKLLGDINWLRPYLKLTTGDLKPLFDTLKGDSDPNSHRSLSKEALASLEKVETAIAEQFVTHINYSLPLIFLIFNTALTPTGLFWQDNPIMWIHLPASPKKVLLPYYDAIADLIILGRDHSKKYFGIEPSTIIQPYSKSQIDWLMQNTEMWPIACASFVGILDNHYPPNKLIQFCKLHTF

SEQ ID NO: 169 - protein, 441 aa, Synthetic construct
MIGAIESNLFADQISWKSDQPVWLNQWPLKQEKLQALQQLVTEQLQLGHLEESNSPWNTPVFVIKKKSGKWRLLQDLRAVNATMHDMGALQPGLPSPVAVPKGWEIIIIDLQDCFFNIKLHPEDCKRFAFSVPSPNFKRPYQRFQWKVLPQGMKNSPTLCQKFVDKAILTVRDKYQDSYIVHYMDDILLAHPSRSIVDEILTSMIQALNKHGLVVSTEKIQKYDNLKYLGTHIQGDAVSYQKLQIRTDKLRTLNDFQKLLGNINWIRPFLKLTTGELKPLFEILNGDSNPISIRKLTPEACKALQLVNERLSIARVKRLDLSRPWSLCILKTEYTPTACLWQNGVLEWIHLPHISPKVITPYDIFCTQLIIKGRHRSKELFSKDPDYIVVPYTKVQFDLLLQEKEDWPISLLGFLGEVHFHLPKDPLLTFTLQTAIIFPHM

SEQ ID NO: 170 - DNA, 2031 bp, Synthetic construct
  source 1..2031: mol_type = other DNA
accctgaatattgaggatgaatacagactgcatgagacctctaaggaacccgatgtgagcctgggaagcacttggctgagcgacttccctcaggcatgggctgagactggaggcatgggcctggccgtgaggcaggcacctctgattatcctgctgaaggccacatccaccccagtgtcaattaagcagtaccccatgaggcagaaggcaagactgggaattaagccacacatccagagactgctggatcagggcatcctggtgccttgccagtccccttggaacacacccctgctgcctgtgaagaagcctggcaccaatgattataggccagtgcaggacctgagggaggtgaacaagagagtggaagacattcatcctaccgtgcctaacccatacaatctgctgtctggtctgcctccaagccaccagtggtatactgtgctggatctgaaggacgcattcttttgtctgaggctgcatcccacatcacagcctctgttcgcttttgagtggagagatcccgaaatgggaatctccggccagctgacttggacaaggctgccccagggtttcaagaactcacctgccctgtttaacgaggcactgagaagggatctggccgatttcaggattcagcacccagacctgatcctgctgcagtatgtggatgacctgctgctggctgccacctccgaactggattgccagcagggaactagggcactgctgcagacactgggtgacctggggtatagagcctcagcaaagaaggctcagatttgtcagaagcaggtgaagtacctgggttatctgctgaaggaggggcagaggtggctgaccgaggctagaaaggaaactgtgatggggcagcccacacctaagaccccaaggcagctgagaaagttcctgggaaaggctggcaattgcaggctgttcattcccggatttgccgagatggcagctccactgtaccccctgaccaagccaggaactctgtttaactggggccccgaccagcagaaggcatatcaggaaatcaagcaggctctgctgactgctcctgccctgggcctgcctgatctgacaaagcccttcgagctgtttgtggacgaaaagcagggttacgctaagggggtgctgacccagaagctgggtccttggagaaggcccgtggcctatctgtctaagaagctggaccctgtggctgcaggatggcccccttgcctgagaatggtggctgccattgctgtgctgacaaaggacgccggaaagctgactatgggacagcctctggttattggggcaccacatgctgtggaagccctggtgaagcagccacccgataggtggctgagcaaggccagaatgacccactaccaggcactgctgctggatactgacagggtgcagttcggccccgtggtggctctgaatcctgccactctgctgccactgcccgaggaaggtctgcagcataactgtctggacatcctggcagaggctcacgggacaagacctgatctgaccgaccagcctctgccagatgccgaccatacttggtatacaggtgggtctagcctgctgcaggaaggacagaggaaggccggcgcagctgtgaccactgagacagaagtgatttgggccaaggcactgccagctggaacatctgcacagagggctgagctgatcgcactgacccaggctctgagaatggccgaaggcaagaagctgaacgtgtacaccaactctaggtatgctttcgccacagcacacattcagggtgaaatctacagaaggagaggttggctgacaagcgaggggaaggaaattaagaataaggatgaaatcctggcactgctgaaggctctgtttctgcctaagagactgtccattatccactgtccaggacatcagaagggccactcagctgaggccaggggaaacagaatggctaatcaggccgcaaggaaggctgccattaccgagaacccagacaccagcactctgcccatcgaaaattcctcacct

SEQ ID NO: 171 - DNA, 2031 bp, Synthetic construct
  source 1..2031: mol_type = other DNA
accgtgtccctgcaggatgagcacagactgttcgacatccctgtgaccacttcactgccagacgtgtggctgcaggactttcctcaggcttgggctgaaaccggaggcctgggtagggcaaagtgccaggcaccaattatcattgatctgaagcctactgccgtgccagtgtctatcaagcagtaccctatgagcctggaggcacacatgggtattagacagcatatcattaagttcctggaactgggggtgctgagaccctgtaggtctccttggaacacacccctgctgcctgtgaagaagccaggaacccaggattacaggcccgtgcaggacctgagggagatcaataagagaacagtggatattcatcctaccgtgcccaacccttataatctgctgtccaccctgaagccagactactcatggtatactgtgctggatctgaaggacgctttcttttgcctgcctctggctcctcagagccaggagctgttcgctttcgagtggaaggaccctgagagaggtatctctgggcagctgacatggaccaggctgcctcagggattcaagaatagcccaaccctgtttaacgaggccctgcacagggatctgactgacttcagaacacagcatccagaagtgacactgctgcagtatgtggatgacctgctgctggctgcccccaccaagaaggcatgcactcagggcacaagacacctgctgcaggagctgggagaaaagggctatagggcatccgctaagaaggctcagatttgccagaccaaagtgacttacctgggttatattctgtcagaggggaagaggtggctgactcccggaagaatcgaaacagtggctaggattcctccacccagaaaccctagggaggtgagagagttcctgggtaaggccgggttttgtagactgttcattcccggctttgctgagctggcagctcctctgtatgccctgaccaagccttccacacctttcacctggcagactgaacatcagctggcttttgaggccctgaagaaggctctgctgtctgcccctgcactgggactgccagatacaagcaagcccttcaccctgtttctggacgagagacagggaatcgcaaagggcgtgctgactcagaagctgggtccttggaagaggcccgtggcttacctgtctaagaagctggaccctgttgctgcaggatggcctccatgcctgaggattatggctgccaccgcaatgctggtgaaggactctgctaagctgactctgggtcagcccctgacagtgatcacccctcacactctggaggctattgtgaggcagccccctgatagatggatcactaatgccagactgacacattatcaggcactgctgctggatactgacagggtgcagtttgggccacccgtgaccctgaaccctgccactctgctgccagtgcccgaaaatcagccttccccacacgactgtagacaggtgctggccgaaacccacggaaccagagaggatctgaaggaccaggaactgcctgatgcagaccacacttggtacacagatgggtctagctatctggactcaggaacaagaagggcaggcgcagctgtggtggatggacataacactatttgggctcagtccctgcctccaggcacatcagcacagaaggctgagctgatcgctctgactaaggccctggaactgtctaagggaaagaaggccaatatctacacagacagcagatatgctttcgccaccgcacacactcatggctccatctacgagagaaggggatggctgacctcagagggcaaggaaattaagaacaaggcagagatcattgctctgctgaaggccctgtttctgccacaggaagtggctatcattcactgcccaggtcatcagaaaggacaggaccctgtggctgtgggaaacaggcaggcagacagggtggctagacaggccgcaatggccgaggtgctgacactggcaaccgaacccgataatacctctcacattact

SEQ ID NO: 172 - DNA, 2019 bp, Synthetic construct
  source 1..2019: mol_type = other DNA
ctggtgctgaacctggaggaagagtacagactgaacgagaagcctgtgcctccatccattgatccatcatggctgcagctgttccctatggtgtgggctgaaaaggccggtatggggctggccaatcaggtgccccctgtggtggtggagctgaagtctgatgccagccctgtggcagtgagacagtacccaatgtctaaggaagctagagagggtattaggcctcatatccagaggtttctggacctggggattctggtgccctgccagagcccttggaacaccccactgctgcccgtgaagaagcccggcactaatgattataggcctgtgcaggacctgagagaagtgaacaagagggtgcaggatattcacccaactgtgccaaacccctacaatctgctgtctagcctgccaccctctcatacatggtatagcgtgctggatctgaaggacgccttcttttgtctgaagctgcacccaaactcccagcccctgttcgctttcgagtggagagatcctgagaagggaaacaccggccagctgacttggacaaggctgccacagggattcaagaactctcccactctgtttaacgaggccctgcatagagacctggcttcattcagggccctgaatcctcaggttgtgatgctgcagtatgtggatgacctgctggtggctgccccaacctatagagactgcaaggaaggaactagaaggctgctgcaggagctgtccaagctgggctacagagtgtcagcaaagaaggctcagctgtgcagggaagaggtgacatacctgggttatctgctgaagggaggcaagagatggctgaccccagccaggaaggcaactgtgatgaagattcctacaccaaccactcccagacaggtgagggagttcctgggtaaggcagggttttgcagactgttcattcctgggttcgcttccctggcagctcctctgtatccactgacaagacctaaggtgcctttcacctggactgaagcacaccaggaggcttttggaaggattaaggaggctctgctgtcagctcccgccctggcactgcctgatctgaccaagccatttgccctgtatgtggatgaaaaggagggagtggcaaggggcgtgctgacacagaccctgggtccttggagaaggccagtggcttatctgtctaagaagctggaccctgttgccagcggatggccaacatgcctgaaggctatcgccgcagtggccctgctgctgaaggatgctgacaagctgaccctgggccagaacgtgctggttattgcccctcacaatctggaaagcatcgtgagacagcctccagacaggtggatgacaaatgcaagaatgacccattaccagtccctgctgctgaacgagagggtgtcattcgctccccctgccattctgaatcccgctactctgctgcctgtggaatctgatgacacaccaattcatatctgtagcgagatcctggctgaagagactggtacaagacccgatctgagagaccagccactgcctggagtgcctgcctggtatactgatggatcttctttcattatggatggaagaaggcaggcaggcgctgccatcgtggataacaagagaacagtgtgggcttctaatctgcctgaaggaaccagcgcacagaaggctgagctgattgccctgacccaggcactgagactggctgagggcaagtccattaacatctacacagattcaaggtatgcttttgccaccgcacacgtgcatggtgccatctacaagcagagaggttggctgacttctgcagggaaggacattaagaataaggaagagatcctggccctgctggaagcaatccacctgccaaagagggtggccattatccactgtcctggtcatcagagagggactgatccagtggcaacaggaaacaggaaggctgacgaggcagctaagcaggccgcacagagcaccaggattctgactgaaacaaccaagaatcaggagcat

SEQ ID NO: 173 - DNA, 2019 bp, Synthetic construct
  source 1..2019: mol_type = other DNA
accgctcctctggaggaagagtacagactgttcctggaagcacctattcagaacgtgactctgctggagcagtggaagagggaaattcctaaagtgtgggccgagatcaatcctccaggactggcttccacacaggccccaattcacgtgcagctgctgtcaaccgccctgcccgtgagagtgaggcagtaccctatcacactggaggcaaagaggtctctgagggaaaccattagaaagtttagggctgccggaatcctgagacccgtgcacagcccttggaacactccactgctgcccgtgagaaagtccggcacatcagagtataggatggtgcaggatctgagagaggtgaacaagagggtggaaaccattcatcctactgtgccaaatccctacaccctgctgtctctgctgccccctgacagaatctggtatagcgtgctggatctgaaggacgctttcttttgcattcctctggccccagagtcccagctgatcttcgcctttgaatgggcagatgctgaagagggagagtctggccagctgacctggactaggctgccacagggattcaagaacagccccactctgtttaacgaagctctgaatagagacctgcagggcttcaggctggaccacccatctgtgagcctgctgcagtatgtggatgacctgctgattgcagctgatacacaggccgcatgcctgtccgccactagagacctgctgatgacactggcagagctgggttacagggtgtcagggaagaaggcccagctgtgccaggaagaagtgacttatctgggttttaagatccataaggggtccagatcactgtctaacagcaggacacaggctattctgcagatccctgtgccaaagaccaagagacaggtgagggagttcctgggtaagattgggtactgtagactgttcattcctggttttgcagagctggctcagccactgtatgctgccacaaggggaggcaatgatcctctggtgtggggagagaaggaagaggaagcattccagtctctgaagctggctctgactcagccacccgccctggcactgccttccctggacaagccattccagctgtttgtggaggaaacctcaggagcagctaagggcgtgctgactcaggctctgggtccttggaagagacccgtggcctacctgtctaagagactggaccctgttgctgcaggatggccaagatgcctgagggcaatcgctgccgcagctctgctgaccagagaggcttctaagctgaccttcggacaggacattgaaatcacctctagccataacctggagtccctgctgagatcacctccagacaagtggctgacaaatgccaggattacccagtatcaggtgctgctgctggaccctcctagagtgagattcaagcagacagccgcactgaaccccgctaccctgctgcctgagaccgatgacactctgccaatccaccattgtctggataccctggactctctgacaagcaccaggcctgatctgactgaccagccactggctcaggccgaagcaacactgttcaccgatggctcctcatacattagagacggaaagaggtatgctggagctgccgtggtgactctggattctgtgatttgggctgagcccctgcctatcggtactagcgcccagaaggcagaactgattgcactgacaaaggctctggagtggtctaaggataagagcgtgaacatctacactgattctaggtatgcttttgccacactgcacgtgcatggaatgatctacagagaaaggggctggctgacagccggtgggaaggcaattaagaatgctccagagatcctggccctgctgactgcagtgtggctgcccaagagggtggctgtgatgcactgcaagggtcatcagaaggatgacgcccccactagcacagggaatagaagggctgatgaggtggccagagaagtggcaattaggccactgtccactcaggctacaatctca

SEQ ID NO: 174 - DNA, 2019 bp, Synthetic construct
  source 1..2019: mol_type = other DNA
accgctcctctggaggaagagtacagactgttcctggaagcacctattcagaacgtgactctgctggagcagtggaagagggaaattcctaaagtgtgggccgagatcaatcctccaggactggcttccacacaggccccaattcacgtgcagctgctgtcaaccgccctgcccgtgagagtgaggcagtaccctatcacactggaggcaaagaggtctctgagggaaaccattagaaagtttagggctgccggaatcctgagacccgtgcacagcccttggaacactccactgctgcccgtgagaaagtccggcacatcagagtataggatggtgcaggatctgagagaggtgaacaagagggtggaaaccattcatcctactgtgccaaatccctacaccctgctgtctctgctgccccctgacagaatctggtatagcgtgctggatctgaaggacgctttcttttgcattcctctggccccagagtcccagctgatcttcgcctttgaatgggcagatgctgaagagggagagtctggccagctgacctggactaggctgccacagggattcaagaacagccccactctgtttaacgaagctctgaatagagacctgcagggcttcaggctggaccacccatctgtgagcctgctgcagtatgtggatgacctgctgattgcagctgatacacaggccgcatgcctgtccgccactagagacctgctgatgacactggcagagctgggttacagggtgtcagggaagaaggcccagctgtgccaggaagaagtgacttatctgggttttaagatccataaggggtccagatcactgtctaacagcaggacacaggctattctgcagatccctgtgccaaagaccaagagacaggtgagggagttcctgggtaagattgggtactgtagactgttcattcctggttttgcagagctggctcagccactgtatgctgccacaaggcctggcaatgatcctctggtgtggggagagaaggaagaggaagcattccagtctctgaagctggctctgactcagccacccgccctggcactgccttccctggacaagccattccagctgtttgtggaggaaacctcaggagcagctaagggcgtgctgactcaggctctgggtccttggaagagacccgtggcctacctgtctaagagactggaccctgttgctgcaggatggccaagatgcctgagggcaatcgctgccgcagctctgctgaccagagaggcttctaagctgaccttcggacaggacattgaaatcacctctagccataacctggagtccctgctgagatcacctccagacaagtggctgacaaatgccaggattacccagtatcaggtgctgctgctggaccctcctagagtgagattcaagcagacagccgcactgaaccccgctaccctgctgcctgagaccgatgacactctgccaatccaccattgtctggataccctggactctctgacaagcaccaggcctgatctgactgaccagccactggctcaggccgaagcaacactgttcaccgatggctcctcatacattagagacggaaagaggtatgctggagctgccgtggtgactctggattctgtgatttgggctgagcccctgcctatcggtactagcgcccagaaggcagaactgattgcactgacaaaggctctggagtggtctaaggataagagcgtgaacatctacactgattctaggtatgcttttgccacactgcacgtgcatggaatgatctacagagaaaggggctggctgacagccggtgggaaggcaattaagaatgctccagagatcctggccctgctgactgcagtgtggctgcccaagagggtggctgtgatgcactgcaagggtcatcagaaggatgacgcccccactagcacagggaatagaagggctgatgaggtggccagagaagtggcaattaggccactgtccactcaggctacaatctca

SEQ ID NO: 175 - DNA, 2013 bp, Synthetic construct
  source 1..2013: mol_type = other DNA
accctgaatattgaggatgaatacagactgcacgagacctccaagggacccgatgtgcctctgggctctacttggctgagcgacttccctcaggcatgggctgaaaccggaggcatgggcctggccgtgaggcaggcacccctgattatccctctgagagctgcctccactccagtgtctattaagcagtacccaatgtctagggaggccagactgggaattaagccacatatccagagactgctggatcagggcatcctggtgccatgccagagcccctggaacacaccactgctgcccgtgaagaagcccgggaccaatgattataggcctgtgcaggacctgagggaggtgaacaagagagtggaagacattcacccaaccgtgcctaacccatacaatctgctgtctggactgcctccaagccatcagtggtatactgtgctggatctgaaggacgcattcttttgtctgaggctgcaccccacatcccagtcactgttcgcttttgagtggagagaccctgaaatgggtatctccgggcagctgacatggaccaggctgccacagggcttcaagaactcacccacactgtttaacgaggcactgcacagggatctggctgatttcaggattcagcatcctgacctgatcctgctgcagtatgtggatgacctgctgctggcagctacctccgaactggattgccagcagggtactagggctctgctgcagacactgggagacctgggctatagagcctcagcaaagaaggcccagatttgccagaagcaggtgaagtacctgggttatctgctgaaggaggggcagaggtggctgaccgaggctagaaaggaaactgtgatgggccagcccacccctaagactccaaggcagctgagagagttcctgggaaaggctgggttttgcaggctgttcattcccggtttcgccgaaatggccgcacctctgtacccactgactaagcctggaaccctgtttaagtggggcccagatcagcagaaggcttatcaggaaatcaagcaggccctgctgactgctcccgccctgggtctgcctgatctgacaaagccattcgagctgtttgtggacgaaaagcagggatacgccaagggcgtgctgactcagaagctgggaccttggagaaggccagtggcatatctgtctaagaagctggaccctgtggctgctggatggcccccttgcctgagaatggtggcagctattgccgtgctgacaaaggacgcaggaaagctgactatgggacagcccctggttattctggcacctcacgctgtggaggccctggtgaagcagccacccgacaggtggctgagcaatgcaagaatgacccattaccaggctctgctgctggatactgacagggtgcagttcgggccaattgtgaccctgaaccctgccactctgctgccactgcctgaggaaggtctgcagcacgattgtctggacatcctggcagaggctcatgggacaagacccgatctgaccgaccagcctctgccagatgctgaccatacatggtataccgatggctctagctttctgcaggagggtcagaggaaggcaggggccgcagtgaccactgagactgaagtgatttgggccaaggcactgcctgctggtacatctgcacagagagctgagctgatcgctctgacccaggccctgaagatggcagaaggaaagaagctgaacgtgtacactgactctaggtatgctttcgccacagcacacattcatggagaaatctacagaaggagaggttggctgacaagcgaggggaaggaaattaagaacaaggaggaaatcctggctctgctgaaggccctgtttctgcctaagagactgtccattatccactgtccaggtcatcagaaggggaacagggctgaggccaggggaaatagaatggccgatcaggctgccagggaagtggctactagagagacaccagaaacttcaacactgctg

SEQ ID NO: 176 - DNA, 1680 bp, Synthetic construct
  source 1..1680: mol_type = other DNA
cctatttctccaatcgagaccgtgcctgtgaagctgaagccaggcatggatggccccaaggtgaagcagtggccactgacagaggaaaagattaaggctctggtggagatttgcaccgagatggaaaaggagggaaagatttctaagattgggcccgaaaacccttacaataccccagtgttcgctattaagaagaaggattcaactaagtggagaaagctggtggacttcagagaactgaacaagaggactcaggacttttgggaagtgcagctgggcattcctcaccctgcaggactgaagaagaagaagtctgtgacagtgctggatgtgggagacgcttacttttcagtgccactggatgaagacttcagaaagtatacagcctttaccattccatctatcaacaatgagacccccggaattagataccagtataacgtgctgcctcagggttggaaggggagcccagcaattttcaactctagcatgactaagatcctggagccctttagaaagcagaatcctgatattgtgatctaccagtatatggatgacctgtatgtgggtagcgacctggaaattgggcagcacaggactaagatcgaggaactgagacagcatctgctgagatggggtctgaccactccagataagaagcaccagaaggaacctccattcctgtggatggggtacgagctgcatcccgacaagtggactgtgcagccaattgtgctgcccgagaaggattcttggacagtgaacgacatccagaagctggtgggaaagctgaattgggccagccaattctaccccggcatcaaggtgagacagctgtgcaagctgctgaggggtactaaggcactgacagaagtgattcctctgaccgagcctgctgaactggagctggccgaaaacagggagatcctgaaggaacccgtgcacggcgtgtactatgatccttccaaggacctgattgctgagatccagaagcagggtcaggggcagtggacctaccaaatctaccaggaacctttcaagaacctgaagactggaaagtacgcaagaatgaggggcgctcataccaatgatgtgaagcagctgactgaagcagtgcagaagattacaaccgagtcaattgtgatctggggaaagacacctaagtttaagctgccaatccagaaggaaacttgggagacatggtggaccgagtattggcaggctacttggattcctgaatgggagttcgtgaatacaccccctctggtgaagctgtggtatcagctggaaaaggagccaatcgtgggtgcagaaaccttttatgtggatggggctgccaacagagagacaaagctgggaaaggctggctacgtgaccaatagaggaaggcagaaggtggtgaccctgactgacactacaaaccagaagacagaactgcaggcaatctacctggctctgcaggattctggtctggaggttaatatcgtgaccgacagccagtatgccctggggattatccaggcacagccagatcagtccgaatcagagctggtgaaccagattatcgaacagctgattaagaaggagaaggtgtatctggcctgggtgcccgcacataagggaattggaggcaatgagcaggtggacaagctggtgtctgccggcatcaggaaggtgctg

SEQ ID NO: 177 - DNA, 2253 bp, Synthetic construct
  source 1..2253: mol_type = other DNA
atgaatccactgcagctgctgcagccactgcctgcagaaatcaagggaaccaagctgctggctcactgggattccggggccactatcacatgcattcctgaatcatttctggaggacgaacagccaattaagaagacactgatcaagaccattcatggtgaaaagcagcagaacgtgtactatgtgactttcaaggtgaaggggagaaaggtggaggctgaagtgatcgcctccccctacgagtatattctgctgtcaccaacagatgtgccctggctgacccagcagcctctgcagctgacaatcctggtgccactgcaggagtaccaggaaaagattctgtctaagactgctctgccagaagatcagaagcagcagctgaagacactgtttgtgaagtatgacaatctgtggcagcactgggagaaccaagtgggacacagaaagattaggccacataatatcgctacaggcgactaccctccaaggccccagaagcagtatcctattaacccaaaggccaagccttccattcagatcgtgattgatgacctgctgaagcagggtgtgctgacccctcagaactctaccatgaacaccccagtgtaccctgtgccaaagcccgatgggagatggaggatggtgctggactatagagaagtgaataagactatcccactgacagctgcccagaaccagcactctgcaggaatcctggctactattgtgaggcagaagtacaagaccactctggatctggccaatggcttttgggcacatcccattacacctgaatcctactggctgactgcattcacatggcagggaaagcagtattgttggaccagactgccacagggattcctgaactctcccgccctgttcactgcagatgtggtggacctgctgaaggagatccctaacgtgcaggtgtatgtggatgacatctacctgagccacgatgacccaaaggagcatgtgcagcagctggaaaaggtgtttcagatcctgctgcaggctggatatgtggtgtctctgaagaagagcgagatcggtcagaagaccgtggagttcctggggtttaatattactaaggaaggaagaggcctgaccgatactttcaagactaagctgctgaacattacaccccctaaggacctgaagcagctgcagtctatcctgggtctgctgaacttcgccaggaacttcattccaaacttcgcagagctggtgcagcccctgtacaatctgatcgcctctgcaaaggggaagtatattgagtggagcgaggaaaataccaagcagctgaacatggttattgaagctctgaatactgccagcaacctggaggaaagactgccagagcagagactggttattaaggtgaacacttccccctcagcaggatacgtgagatactataatgagacaggcaagaagcctatcatgtacctgaactacgtgttctctaaggctgagctgaagttcagcatgctggaaaagctgctgacaaccatgcacaaggcactgattaaggctatggatctggctatgggacaggaaattctggtgtactccccaatcgtgtcaatgaccaagattcagaagactcctctgccagagagaaaggctctgcctatcaggtggattacctggatgacttacctggaagatccaaggattcagtttcactatgacaagacactgcccgagctgaagcatattcctgacgtgtatacctctagccagtctcctgtgaagcatccaagccagtacgaaggagtgttctatacagatggctctgccatcaagagccccgaccctaccaagtctaacaatgctggtatggggattgtgcacgctacatacaagcccgagtatcaggtgctgaatcagtggagcatccctctgggaaaccataccgcacagatggctgagattgcagctgtggaatttgcatgcaagaaggctctgaagatcccaggccctgtgctggttattactgattccttttacgtggccgagtcagcaaataaggaactgccctattggaagtccaacggcttcgtgaacaacaagaagaagcctctgaagcacatctccaagtggaagtcaattgccgagtgtctgtctatgaagccagatattaccattcagcatgaaaagggtatcagcctgcagattcccgtgttcatcctgaagggtaatgctctggccgacaagctggcaactcagggatcttacgtggtgaac

SEQ ID NO: 178 - DNA, 1755 bp, Synthetic construct
  source 1..1755: mol_type = other DNA
ctgaccgctgccatcgacattctggctccccagcagtgcgccgagcctatcacctggaagtcagatgaaccagtgtgggtggaccagtggccactgactaacgataagctggcagctgcccagcagctggtgcaggagcagctggaagccggacacattactgagtctagctccccttggaacacaccaatctttgtgattaagaagaagtctggcaagtggagactgctgcaggacctgagggccgtgaatgcaacaatggtgctgatgggtgctctgcagccaggactgccatcccctgtggcaatcccccagggttacctgaagattatcattgatctgaaggactgtttctttagcattcctctgcatccatccgatcagaagagattcgctttctctctgccctccaccaacttcaaggaacctatgcagaggtttcagtggaaggtgctgccacaggggatggctaattcccccaccctgtgccagaagtatgtggctactgccatccacaaggtgagacatgcctggaagcagatgtacatcattcactatatggatgacatcctgattgcaggaaaggacggccagcaggtgctgcagtgtttcgatcagctgaagcaggagctgactgcagctggactgcatattgcccccgaaaaggtgcagctgcaggacccttacacttatctgggattcgagctgaacggcccaaagatcacaaatcagaaggcagtgattagaaaggataagctgcagaccctgaacgactttcagaagctgctgggagatattaactggctgaggccctacctgaagctgaccactggcgatctgaagcctctgttcgacactctgaagggcgattcagacccaaactctcacagaagcctgtccaaggaggcactggcttcactggagaaggtggaaacagccatcgcagaacagtttgtgacccatattaactattctctgccactgatcttcctgattttcaacaccgctctgactcctacaggtctgttctggcaggacaatccaatcatgtggattcacctgcccgccagccctaagaaggtgctgctgccctactatgatgctatcgccgacctgatcattctgggtagggatcatagcaagaagtactttgggatcgagccatccacaatcattcagccctattcaaagtctcagattgactggctgatgcagaataccgaaatgtggcctatcgcatgcgcttcattcgtgggcattctggataaccactaccctccaaataagctgattcagttttgtaagctgcataccttcgtgtttcctcagatcatttctaagactccactgaacaatgccctgctggtgttcacagacggatcatctaccggcatggccgcatataccctgactgatacaaccatcaagtttcagactaacctgaatagcgcacagctggtggaactgcaggctctgattgccgtgctgtccgctttcccaaaccagcccctgaatatctacacagactcagcatatctggctcactctattcccctgctggagacagtggcacagatcaagcatattagcgaaaccgctaagctgttcctgcagtgccagcagctgatctacaacagatcaatccctttttatatcggtcacgtgagggcccattctggtctgccagggcccattgcacaggggaatcagagggccgatctggcaactaagatcgtggcttccaacattaataca

SEQ ID NO: 179 - DNA, 1731 bp, Synthetic construct
  source 1..1731: mol_type = other DNA
atgattggcgccatcgagtccaacctgtttgcagatcagatttcttggaagtcagaccagcccgtgtggctgaatcagtggcctctgaagcaggagaagctgcaggctctgcagcagctggtgaccgaacagctgcagctgggccacctggaggaatctaacagcccctggaatactccagtgttcgtgattaagaagaagtctggaaagtggagactgctgcaggatctgagggcagtgaatgctaccatgcatgacatgggggctctgcagcctggactgccatctcctgtggccgtgcccaagggatgggagattatcattatcgatctgcaggactgcttctttaacatcaagctgcaccctgaagattgtaagagattcgccttttctgtgcccagccctaatttcaagagaccatatcagaggtttcagtggaaggtgctgccacagggtatgaagaactcccccacactgtgccagaagtttgtggataaggcaattctgaccgtgagagacaagtaccaggactcatatattgtgcactacatggatgacatcctgctggcccatccttccaggtcaattgtggacgagatcctgacttccatgatccaggcactgaacaagcacgggctggtggtgtcaactgaaaagatccagaagtacgataatctgaagtacctgggcacacatatccagggtgacgccgtgtcataccagaagctgcagattagaactgataagctgaggacactgaacgacttccagaagctgctgggaaacattaattggatcagacccttcctgaagctgaccactggggagctgaagcctctgtttgaaatcctgaacggagattccaatcccatttcaatcaggaagctgacacctgaggcctgcaaggcactgcagctggtgaacgagagactgtctatcgctcgtgtgaagagactggatctgtctcggccttggagcctgtgcattctgaagaccgagtatactcccacagcctgtctgtggcagaacggagtgctggagtggattcacctgccacatatcagccccaaagtgattacaccttacgatattttctgcacccagctgattatcaagggaagacataggtccaaggagctgttttcaaaggaccctgactatatcgtggtgccatacaccaaggtgcagttcgatctgctgctgcaggagaaggaagactggccaatttccctgctgggattcctgggcgaggtgcactttcatctgcctaaggaccctctgctgaccttcactctgcagactgcaattatctttcctcacatgacatcaacaaccccactggaaaaggggattgtgatctttaccgacggctctgctaatggtagaagcgtgacttatatccagggaagggagccaattatcaaggaaaacactcagaatacagctcagcaggccgaaattgtggcagtgatcactgctttcgaggaagtgtctcagagctttaacctgtataccgattctaagtatgtgactggtctgtttcctgagattgaaacagctaccctgagcccaagaaccaaaatctacactgagctgagacacctgcagaggctgattcataagagacaggaaaagttctacattggccacatcaggggtcatacagggctgccaggacccctggcacagggtaatgcttacgccgactccctgacaaggattctgaccgct

SEQ ID NO: 180 - DNA, 2253 bp, Synthetic construct
  source 1..2253: mol_type = other DNA
atgaatccactgcagctgctgcagccactgcctgcagaaatcaagggaaccaagctgctggctcactgggattccggggccactatcacatgcattcctgaatcatttctggaggacgaacagccaattaagaagacactgatcaagaccattcatggtgaaaagcagcagaacgtgtactatgtgactttcaaggtgaaggggagaaaggtggaggctgaagtgatcgcctccccctacgagtatattctgctgtcaccaacagatgtgccctggctgacccagcagcctctgcagctgacaatcctggtgccactgcaggagtaccaggaaaagattctgtctaagactgctctgccagaagatcagaagcagcagctgaagacactgtttgtgaagtatgacaatctgtggcagcactgggagaaccaagtgggacacagaaagattaggccacataatatcgctacaggcgactaccctccaaggccccagaagcagtatcctattaacccaaaggccaagccttccattcagatcgtgattgatgacctgctgaagcagggtgtgctgacccctcagaactctaccatgaacaccccagtgtaccctgtgccaaagcccgatgggagatggaggatggtgctggactatagagaagtgaataagactatcccactgacagctgcccagaaccagcactctgcaggaatcctggctactattgtgaggcagaagtacaagaccactctggatctggccaatggcttttgggcacatcccattacacctgaatcctactggctgactgcattcacatggcagggaaagcagtattgttggaccagactgccacagggattcctgaactctcccgccctgttcaacgcagatgtggtggacctgctgaaggagatccctaacgtgcaggtgtatgtggatgacatctacctgagccacgatgacccaaaggagcatgtgcagcagctggaaaaggtgtttcagatcctgctgcaggctggatatgtggtgtctctgaagaagagcgagatcggtcagaagaccgtggagttcctggggtttaatattactaaggaaggaagaggcctgaccgatactttcaagactaagctgctgaacattacaccccctaaggacctgaagcagctgcagtctatcctgggtaagctgaacttcgccaggaacttcattccaaacttcgcagagctggtgcagcccctgtacaatctgatcgcctctgcaaagcctaagtatattgagtggagcgaggaaaataccaagcagctgaacatggttattgaagctctgaatactgccagcaacctggaggaaagactgccagagcagagactggttattaaggtgaacacttccccctcagcaggatacgtgagatactataatgagacaggcaagaagcctatcatgtacctgaactacgtgttctctaaggctgagctgaagttcagcatgctggaaaagctgctgacaaccatgcacaaggcactgattaaggctatggatctggctatgggacaggaaattctggtgtactccccaatcgtgtcaatgaccaagattcagaagactcctctgccagagagaaaggctctgcctatcaggtggattacctggatgacttacctggaagatccaaggattcagtttcactatgacaagacactgcccgagctgaagcatattcctgacgtgtatacctctagccagtctcctgtgaagcatccaagccagtacgaaggagtgttctatacagatggctctgccatcaagagccccgaccctaccaagtctaacaatgctggtatggggattgtgcacgctacatacaagcccgagtatcaggtgctgaatcagtggagcatccctctgggaaaccataccgcacagatggctgagattgcagctgtggaatttgcatgcaagaaggctctgaagatcccaggccctgtgctggttattactgattccttttacgtggccgagtcagcaaataaggaactgccctattggaagtccaacggcttcgtgaacaacaagaagaagcctctgaagcacatctccaagtggaagtcaattgccgagtgtctgtctatgaagccagatattaccattcagcatgaaaagggtatcagcctgcagattcccgtgttcatcctgaagggtaatgctctggccgacaagctggcaactcagggatcttacgtggtgaac

SEQ ID NO: 181 - DNA, 2253 bp, Synthetic construct
  source 1..2253: mol_type = other DNA
atgaatccactgcagctgctgcagccactgcctgcagaaatcaagggaaccaagctgctggctcactgggattccggggccactatcacatgcattcctgaatcatttctggaggacgaacagccaattaagaagacactgatcaagaccattcatggtgaaaagcagcagaacgtgtactatgtgactttcaaggtgaaggggagaaaggtggaggctgaagtgatcgcctccccctacgagtatattctgctgtcaccaacagatgtgccctggctgacccagcagcctctgcagctgacaatcctggtgccactgcaggagtaccaggaaaagattctgtctaagactgctctgccagaagatcagaagcagcagctgaagacactgtttgtgaagtatgacaatctgtggcagcactgggagaaccaagtgggacacagaaagattaggccacataatatcgctacaggcgactaccctccaaggccccagaagcagtatcctattaacccaaaggccaagccttccattcagatcgtgattgatgacctgctgaagcagggtgtgctgacccctcagaactctaccatgaacaccccagtgtaccctgtgccaaagcccgatgggagatggaggatggtgctggactatagagaagtgaataagactatcccactgacagctgcccagaaccagcactctgcaggaatcctggctactattgtgaggcagaagtacaagaccactctggatctggccaatggcttttgggcacatcccattacacctgaatcctactggctgactgcattcacatggcagggaaagcagtattgttggaccagactgccacagggattcctgaactctcccgccctgttcaacgcagatgtggtggacctgctgaaggagatccctaacgtgcaggtgtatgtggatgacatctacctgagccacgatgacccaaaggagcatgtgcagcagctggaaaaggtgtttcagatcctgctgcaggctggatatgtggtgtctctgaagaagagcgagatcggtcagaagaccgtggagttcctggggtttaatattactaaggaaggaagaggcctgaccgatactttcaagactaagctgctgaacattacaccccctaaggacctgaagcagctgcagtctatcctgggtaagctgaacttcgccaggaacttcattccaaacttcgcagagctggtgcagcccctgtacaatctgatcgcctctgcaaaggggccttatattgagtggagcgaggaaaataccaagcagctgaacatggttattgaagctctgaatactgccagcaacctggaggaaagactgccagagcagagactggttattaaggtgaacacttccccctcagcaggatacgtgagatactataatgagacaggcaagaagcctatcatgtacctgaactacgtgttctctaaggctgagctgaagttcagcatgctggaaaagctgctgacaaccatgcacaaggcactgattaaggctatggatctggctatgggacaggaaattctggtgtactccccaatcgtgtcaatgaccaagattcagaagactcctctgccagagagaaaggctctgcctatcaggtggattacctggatgacttacctggaagatccaaggattcagtttcactatgacaagacactgcccgagctgaagcatattcctgacgtgtatacctctagccagtctcctgtgaagcatccaagccagtacgaaggagtgttctatacagatggctctgccatcaagagccccgaccctaccaagtctaacaatgctggtatggggattgtgcacgctacatacaagcccgagtatcaggtgctgaatcagtggagcatccctctgggaaaccataccgcacagatggctgagattgcagctgtggaatttgcatgcaagaaggctctgaagatcccaggccctgtgctggttattactgattccttttacgtggccgagtcagcaaataaggaactgccctattggaagtccaacggcttcgtgaacaacaagaagaagcctctgaagcacatctccaagtggaagtcaattgccgagtgtctgtctatgaagccagatattaccattcagcatgaaaagggtatcagcctgcagattcccgtgttcatcctgaagggtaatgctctggccgacaagctggcaactcagggatcttacgtggtgaac

SEQ ID NO: 182 - DNA, 1755 bp, Synthetic construct
  source 1..1755: mol_type = other DNA
ctgaccgctgccatcgacattctggctccccagcagtgcgccgagcctatcacctggaagtcagatgaaccagtgtgggtggaccagtggccactgactaacgataagctggcagctgcccagcagctggtgcaggagcagctggaagccggacacattactgagtctagctccccttggaacacaccaatctttgtgattaagaagaagtctggcaagtggagactgctgcaggacctgagggccgtgaatgcaacaatggtgctgatgggtgctctgcagccaggactgccatcccctgtggcaatcccccagggttacctgaagattatcattgatctgaaggactgtttctttagcattcctctgcatccatccgatcagaagagattcgctttctctctgccctccaccaacttcaaggaacctatgcagaggtttcagtggaaggtgctgccacaggggatggctaattcccccaccctgtgccagaagtatgtggctactgccatccacaaggtgagacatgcctggaagcagatgtacatcattcactatatggatgacatcctgattgcaggaaaggacggccagcaggtgctgcagtgtttcgatcagctgaagcaggagctgactgcagctggactgcatattgcccccgaaaaggtgcagctgcaggacccttacacttatctgggattcgagctgaacggcccaaagatcacaaatcagaaggcagtgattagaaaggataagctgcagaccctgaacgactttcagaagctgctgggaaagattaactggctgaggcccttcctgaagctgaccactggcgatctgaagcctctgttcgacactctgaagggcgattcagacccaaactctcacagaagcctgtccaaggaggcactggcttcactggagaaggtggaaacagccatcgcagaacagtttgtgacccatattaactattctctgccactgatcttcctgattttcaacaccgctctgactcctacaggtctgttctggcaggacaatccaatcatgtggattcacctgcccgccagccctaagaaggtgctgctgccctactatgatgctatcgccgacctgatcattctgggtagggatcatagcaagaagtactttgggatcgagccatccacaatcattcagccctattcaaagtctcagattgactggctgatgcagaataccgaaatgtggcctatcgcatgcgcttcattcgtgggcattctggataaccactaccctccaaataagctgattcagttttgtaagctgcataccttcgtgtttcctcagatcatttctaagactccactgaacaatgccctgctggtgttcacagacggatcatctaccggcatggccgcatataccctgactgatacaaccatcaagtttcagactaacctgaatagcgcacagctggtggaactgcaggctctgattgccgtgctgtccgctttcccaaaccagcccctgaatatctacacagactcagcatatctggctcactctattcccctgctggagacagtggcacagatcaagcatattagcgaaaccgctaagctgttcctgcagtgccagcagctgatctacaacagatcaatccctttttatatcggtcacgtgagggcccattctggtctgccagggcccattgcacaggggaatcagagggccgatctggcaactaagatcgtggcttccaacattaataca

SEQ ID NO: 183 - DNA, 1755 bp, Synthetic construct
  source 1..1755: mol_type = other DNA
ctgaccgctgccatcgacattctggctccccagcagtgcgccgagcctatcacctggaagtcagatgaaccagtgtgggtggaccagtggccactgactaacgataagctggcagctgcccagcagctggtgcaggagcagctggaagccggacacattactgagtctagctccccttggaacacaccaatctttgtgattaagaagaagtctggcaagtggagactgctgcaggacctgagggccgtgaatgcaacaatggtgctgatgggtgctctgcagccaggactgccatcccctgtggcaatcccccagggttacctgaagattatcattgatctgaaggactgtttctttagcattcctctgcatccatccgatcagaagagattcgctttctctctgccctccaccaacttcaaggaacctatgcagaggtttcagtggaaggtgctgccacaggggatggctaattcccccaccctgtgcaacaagtatgtggctactgccatccacaaggtgagacatgcctggaagcagatgtacatcattcactatatggatgacatcctgattgcaggaaaggacggccagcaggtgctgcagtgtttcgatcagctgaagcaggagctgactgcagctggactgcatattgcccccgaaaaggtgcagctgcaggacccttacacttatctgggattcgagctgaacggcccaaagatcacaaatcagaaggcagtgattagaaaggataagctgcagaccctgaacgactttcagaagctgctgggaaagattaactggctgaggcccttcctgaagctgaccactggcgatctgaagcctctgttcgacactctgaagggcgattcagacccaaactctcacagaagcctgtccaaggaggcactggcttcactggagaaggtggaaacagccatcgcagaacagtttgtgacccatattaactattctctgccactgatcttcctgattttcaacaccgctctgactcctacaggtctgttctggcaggacaatccaatcatgtggattcacctgcccgccagccctaagaaggtgctgctgccctactatgatgctatcgccgacctgatcattctgggtagggatcatagcaagaagtactttgggatcgagccatccacaatcattcagccctattcaaagtctcagattgactggctgatgcagaataccgaaatgtggcctatcgcatgcgcttcattcgtgggcattctggataaccactaccctccaaataagctgattcagttttgtaagctgcataccttcgtgtttcctcagatcatttctaagactccactgaacaatgccctgctggtgttcacagacggatcatctaccggcatggccgcatataccctgactgatacaaccatcaagtttcagactaacctgaatagcgcacagctggtggaactgcaggctctgattgccgtgctgtccgctttcccaaaccagcccctgaatatctacacagactcagcatatctggctcactctattcccctgctggagacagtggcacagatcaagcatattagcgaaaccgctaagctgttcctgcagtgccagcagctgatctacaacagatcaatccctttttatatcggtcacgtgagggcccattctggtctgccagggcccattgcacaggggaatcagagggccgatctggcaactaagatcgtggcttccaacattaataca

SEQ ID NO: 184 - DNA, 1755 bp, Synthetic construct
  source 1..1755: mol_type = other DNA
ctgaccgctgccatcgacattctggctccccagcagtgcgccgagcctatcacctggaagtcagatgaaccagtgtgggtggaccagtggccactgactaacgataagctggcagctgcccagcagctggtgcaggagcagctggaagccggacacattactgagtctagctccccttggaacacaccaatctttgtgattaagaagaagtctggcaagtggagactgctgcaggacctgagggccgtgaatgcaacaatggtgctgatgggtgctctgcagccaggactgccatcccctgtggcaatcccccagggttacctgaagattatcattgatctgaaggactgtttctttagcattcctctgcatccatccgatcagaagagattcgctttctctctgccctccaccaacttcaaggaacctatgcagaggtttcagtggaaggtgctgccacaggggatggctaattcccccaccctgtgccagaagtatgtggctactgccatccacaaggtgagacatgcctggaagcagatgtacatcattcactatatggatgacatcctgattgcaggaaaggacggccagcaggtgctgcagtgtttcgatcagctgaagcaggagctgactgcagctggactgcatattgcccccgaaaaggtgcagctgcaggacccttacacttatctgggattcgagctgaacggcccaaagatcacaaatcagaaggcagtgattagaaaggataagctgcagaccctgaacgactttcagaagctgctgggaaagattaactggctgaggcccttcctgaagctgaccactggcgatctgaagcctctgttcgacactctgaagcctgattcagacccaaactctcacagaagcctgtccaaggaggcactggcttcactggagaaggtggaaacagccatcgcagaacagtttgtgacccatattaactattctctgccactgatcttcctgattttcaacaccgctctgactcctacaggtctgttctggcaggacaatccaatcatgtggattcacctgcccgccagccctaagaaggtgctgctgccctactatgatgctatcgccgacctgatcattctgggtagggatcatagcaagaagtactttgggatcgagccatccacaatcattcagccctattcaaagtctcagattgactggctgatgcagaataccgaaatgtggcctatcgcatgcgcttcattcgtgggcattctggataaccactaccctccaaataagctgattcagttttgtaagctgcataccttcgtgtttcctcagatcatttctaagactccactgaacaatgccctgctggtgttcacagacggatcatctaccggcatggccgcatataccctgactgatacaaccatcaagtttcagactaacctgaatagcgcacagctggtggaactgcaggctctgattgccgtgctgtccgctttcccaaaccagcccctgaatatctacacagactcagcatatctggctcactctattcccctgctggagacagtggcacagatcaagcatattagcgaaaccgctaagctgttcctgcagtgccagcagctgatctacaacagatcaatccctttttatatcggtcacgtgagggcccattctggtctgccagggcccattgcacaggggaatcagagggccgatctggcaactaagatcgtggcttccaacattaataca

SEQ ID NO: 185 - DNA, 1755 bp, Synthetic construct
  source 1..1755: mol_type = other DNA
ctgaccgctgccatcgacattctggctccccagcagtgcgccgagcctatcacctggaagtcagatgaaccagtgtgggtggaccagtggccactgactaacgataagctggcagctgcccagcagctggtgcaggagcagctggaagccggacacattactgagtctagctccccttggaacacaccaatctttgtgattaagaagaagtctggcaagtggagactgctgcaggacctgagggccgtgaatgcaacaatggtgctgatgggtgctctgcagccaggactgccatcccctgtggcaatcccccagggttacctgaagattatcattgatctgaaggactgtttctttagcattcctctgcatccatccgatcagaagagattcgctttctctctgccctccaccaacttcaaggaacctatgcagaggtttcagtggaaggtgctgccacaggggatggctaattcccccaccctgtgccagaagtatgtggctactgccatccacaaggtgagacatgcctggaagcagatgtacatcattcactatatggatgacatcctgattgcaggaaaggacggccagcaggtgctgcagtgtttcgatcagctgaagcaggagctgactgcagctggactgcatattgcccccgaaaaggtgcagctgcaggacccttacacttatctgggattcgagctgaacggcccaaagatcacaaatcagaaggcagtgattagaaaggataagctgcagaccctgaacgactttcagaagctgctgggaaagattaactggctgaggcccttcctgaagctgaccactggcgatctgaagcctctgttcgacactctgaagggcgatcctgacccaaactctcacagaagcctgtccaaggaggcactggcttcactggagaaggtggaaacagccatcgcagaacagtttgtgacccatattaactattctctgccactgatcttcctgattttcaacaccgctctgactcctacaggtctgttctggcaggacaatccaatcatgtggattcacctgcccgccagccctaagaaggtgctgctgccctactatgatgctatcgccgacctgatcattctgggtagggatcatagcaagaagtactttgggatcgagccatccacaatcattcagccctattcaaagtctcagattgactggctgatgcagaataccgaaatgtggcctatcgcatgcgcttcattcgtgggcattctggataaccactaccctccaaataagctgattcagttttgtaagctgcataccttcgtgtttcctcagatcatttctaagactccactgaacaatgccctgctggtgttcacagacggatcatctaccggcatggccgcatataccctgactgatacaaccatcaagtttcagactaacctgaatagcgcacagctggtggaactgcaggctctgattgccgtgctgtccgctttcccaaaccagcccctgaatatctacacagactcagcatatctggctcactctattcccctgctggagacagtggcacagatcaagcatattagcgaaaccgctaagctgttcctgcagtgccagcagctgatctacaacagatcaatccctttttatatcggtcacgtgagggcccattctggtctgccagggcccattgcacaggggaatcagagggccgatctggcaactaagatcgtggcttccaacattaataca

SEQ ID NO: 186 - DNA, 1755 bp, Synthetic construct
  source 1..1755: mol_type = other DNA
ctgaccgctgccatcgacattctggctccccagcagtgcgccgagcctatcacctggaagtcagatgaaccagtgtgggtggaccagtggccactgactaacgataagctggcagctgcccagcagctggtgcaggagcagctggaagccggacacattactgagtctagctccccttggaacacaccaatctttgtgattaagaagaagtctggcaagtggagactgctgcaggacctgagggccgtgaatgcaacaatggtgctgatgggtgctctgcagccaggactgccatcccctgtggcaatcccccagggttacctgaagattatcattgatctgaaggactgtttctttagcattcctctgcatccatccgatcagaagagattcgctttctctctgccctccaccaacttcaaggaacctatgcagaggtttcagtggaaggtgctgccacaggggatggctaattcccccaccctgtgccagaagtatgtggctactgccatccacaaggtgagacatgcctggaagcagatgtacatcattcactatatggatgacatcctgattgcaggaaaggacggccagcaggtgctgcagtgtttcgatcagctgaagcaggagctgactgcagctggactgcatattgcccccgaaaaggtgcagctgcaggacccttacacttatctgggattcgagctgaacggcccaaagatcacaaatcagaaggcagtgattagaaaggataagctgcagaccctgaacgactttcagaagctgctgggaaagattaactggctgaggcccttcctgaagctgaccactggcgatctgaagcctctgttcgacactctgaagggcgattcagacccaaactctcacagaagcctgtccaaggaggcactggcttcactggagaaggtggaaacagccatcgcagaacagtttgtgacccatattaactattctctgccactgatcttcctgattttcaacaccgctctgactcctacaggtctgttctggcaggacaatccaatcatgtggattcacctgcccgccagccctaagaaggtgctgctgccctactatgatgctatcgccgacctgatcattctgggtagggatcatagcaagaagtactttgggatcgagccatccacaatcattcagccctattcaaagtctcagattgactggctgatgcagaataccgaaatgtggcctatcgcatgcgcttcattcgtgggcattctggataaccactaccctccaaataagctgattcagttttgtaagctgcataccttcgtgtttcctcagatcatttctaagactccactgaacaatgccctgctggtgttcacagacggatcatctaccggcatggccgcatataccctgactgatacaaccatcaagtttcagactaacctgaatagcgcacagctggtggaactgcaggctctgattgccgtgctgtccgctttcccaaaccagcccctgaatatctacacagactcagcatatctggctcactctattcccctgctggagacagtggcacagatcaagcatattagcgaatgggctaagctgttcctgcagtgccagcagctgatctacaacagatcaatccctttttatatcggtcacgtgagggcccattctggtctgccagggcccattgcacaggggaatcagagggccgatctggcaactaagatcgtggcttccaacattaataca

SEQ ID NO: 187 - DNA, 1755 bp, Synthetic construct
  source 1..1755: mol_type = other DNA
ctgaccgctgccatcgacattctggctccccagcagtgcgccgagcctatcacctggaagtcagatgaaccagtgtgggtggaccagtggccactgactaacgataagctggcagctgcccagcagctggtgcaggagcagctggaagccggacacattactgagtctagctccccttggaacacaccaatctttgtgattaagaagaagtctggcaagtggagactgctgcaggacctgagggccgtgaatgcaacaatggtgctgatgggtgctctgcagccaggactgccatcccctgtggcaatcccccagggttacctgaagattatcattgatctgaaggactgtttctttagcattcctctgcatccatccgatcagaagagattcgctttctctctgccctccaccaacttcaaggaacctatgcagaggtttcagtggaaggtgctgccacaggggatggctaattcccccaccctgtgccagaagtatgtggctactgccatccacaaggtgagacatgcctggaagcagatgtacatcattcactatatggatgacatcctgattgcaggaaaggacggccagcaggtgctgcagtgtttcgatcagctgaagcaggagctgactgcagctggactgcatattgcccccgaaaaggtgcagctgcaggacccttacacttatctgggattcgagctgaacggcccaaagatcacaaatcagaaggcagtgattagaaaggataagctgcagaccctgaacgactttcagaagctgctgggaaagattaactggctgaggcccttcctgaagctgaccactggcgatctgaagcctctgttcgacactctgaagggcgattcagacccaaactctcacagaagcctgtccaaggaggcactggcttcactggagaaggtggaaacagccatcgcagaacagtttgtgacccatattaactattctctgccactgatcttcctgattttcaacaccgctctgactcctacaggtctgttctggcaggacaatccaatcatgtggattcacctgcccgccagccctaagaaggtgctgctgccctactatgatgctatcgccgacctgatcattctgggtagggatcatagcaagaagtactttgggatcgagccatccacaatcattcagccctattcaaagtctcagattgactggctgatgcagaataccgaaatgtggcctatcgcatgcgcttcattcgtgggcattctggataaccactaccctccaaataagctgattcagttttgtaagctgcataccttcgtgtttcctcagatcatttctaagactccactgaacaatgccctgctggtgttcacagacggatcatctaccggcatggccgcatataccctgactgatacaaccatcaagtttcagactaacctgaatagcgcacagctggtggaactgcaggctctgattgccgtgctgtccgctttcccaaaccagcccctgaatatctacacagactcagcatatctggctcactctattcccctgctggagacagtggcacagatcaagcatattagcgaaaccgctaagtggttcctgcagtgccagcagctgatctacaacagatcaatccctttttatatcggtcacgtgagggcccattctggtctgccagggcccattgcacaggggaatcagagggccgatctggcaactaagatcgtggcttccaacattaataca

SEQ ID NO: 188 - DNA, 1755 bp, Synthetic construct
  source 1..1755: mol_type = other DNA
ctgaccgctgccatcgacattctggctccccagcagtgcgccgagcctatcacctggaagtcagatgaaccagtgtgggtggaccagtggccactgactaacgataagctggcagctgcccagcagctggtgcaggagcagctggaagccggacacattactgagtctagctccccttggaacacaccaatctttgtgattaagaagaagtctggcaagtggagactgctgcaggacctgagggccgtgaatgcaacaatggtgctgatgggtgctctgcagccaggactgccatcccctgtggcaatcccccagggttacctgaagattatcattgatctgaaggactgtttctttagcattcctctgcatccatccgatcagaagagattcgctttctctctgccctccaccaacttcaaggaacctatgcagaggtttcagtggaaggtgctgccacaggggatggctaattcccccaccctgtgcaacaagtatgtggctactgccatccacaaggtgagacatgcctggaagcagatgtacatcattcactatatggatgacatcctgattgcaggaaaggacggccagcaggtgctgcagtgtttcgatcagctgaagcaggagctgactgcagctggactgcatattgcccccgaaaaggtgcagctgcaggacccttacacttatctgggattcgagctgaacggcccaaagatcacaaatcagaaggcagtgattagaaaggataagctgcagaccctgaacgactttcagaagctgctgggaaagattaactggctgaggcccttcctgaagctgaccactggcgatctgaagcctctgttcgacactctgaagcctgattcagacccaaactctcacagaagcctgtccaaggaggcactggcttcactggagaaggtggaaacagccatcgcagaacagtttgtgacccatattaactattctctgccactgatcttcctgattttcaacaccgctctgactcctacaggtctgttctggcaggacaatccaatcatgtggattcacctgcccgccagccctaagaaggtgctgctgccctactatgatgctatcgccgacctgatcattctgggtagggatcatagcaagaagtactttgggatcgagccatccacaatcattcagccctattcaaagtctcagattgactggctgatgcagaataccgaaatgtggcctatcgcatgcgcttcattcgtgggcattctggataaccactaccctccaaataagctgattcagttttgtaagctgcataccttcgtgtttcctcagatcatttctaagactccactgaacaatgccctgctggtgttcacagacggatcatctaccggcatggccgcatataccctgactgatacaaccatcaagtttcagactaacctgaatagcgcacagctggtggaactgcaggctctgattgccgtgctgtccgctttcccaaaccagcccctgaatatctacacagactcagcatatctggctcactctattcccctgctggagacagtggcacagatcaagcatattagcgaaaccgctaagctgttcctgcagtgccagcagctgatctacaacagatcaatccctttttatatcggtcacgtgagggcccattctggtctgccagggcccattgcacaggggaatcagagggccgatctggcaactaagatcgtggcttccaacattaataca

SEQ ID NO: 189 - DNA, 1755 bp, Synthetic construct
  source 1..1755: mol_type = other DNA
ctgaccgctgccatcgacattctggctccccagcagtgcgccgagcctatcacctggaagtcagatgaaccagtgtgggtggaccagtggccactgactaacgataagctggcagctgcccagcagctggtgcaggagcagctggaagccggacacattactgagtctagctccccttggaacacaccaatctttgtgattaagaagaagtctggcaagtggagactgctgcaggacctgagggccgtgaatgcaacaatggtgctgatgggtgctctgcagccaggactgccatcccctgtggcaatcccccagggttacctgaagattatcattgatctgaaggactgtttctttagcattcctctgcatccatccgatcagaagagattcgctttctctctgccctccaccaacttcaaggaacctatgcagaggtttcagtggaaggtgctgccacaggggatggctaattcccccaccctgtgcaacaagtatgtggctactgccatccacaaggtgagacatgcctggaagcagatgtacatcattcactatatggatgacatcctgattgcaggaaaggacggccagcaggtgctgcagtgtttcgatcagctgaagcaggagctgactgcagctggactgcatattgcccccgaaaaggtgcagctgcaggacccttacacttatctgggattcgagctgaacggcccaaagatcacaaatcagaaggcagtgattagaaaggataagctgcagaccctgaacgactttcagaagctgctgggaaagattaactggctgaggcccttcctgaagctgaccactggcgatctgaagcctctgttcgacactctgaagggcgatcctgacccaaactctcacagaagcctgtccaaggaggcactggcttcactggagaaggtggaaacagccatcgcagaacagtttgtgacccatattaactattctctgccactgatcttcctgattttcaacaccgctctgactcctacaggtctgttctggcaggacaatccaatcatgtggattcacctgcccgccagccctaagaaggtgctgctgccctactatgatgctatcgccgacctgatcattctgggtagggatcatagcaagaagtactttgggatcgagccatccacaatcattcagccctattcaaagtctcagattgactggctgatgcagaataccgaaatgtggcctatcgcatgcgcttcattcgtgggcattctggataaccactaccctccaaataagctgattcagttttgtaagctgcataccttcgtgtttcctcagatcatttctaagactccactgaacaatgccctgctggtgttcacagacggatcatctaccggcatggccgcatataccctgactgatacaaccatcaagtttcagactaacctgaatagcgcacagctggtggaactgcaggctctgattgccgtgctgtccgctttcccaaaccagcccctgaatatctacacagactcagcatatctggctcactctattcccctgctggagacagtggcacagatcaagcatattagcgaaaccgctaagctgttcctgcagtgccagcagctgatctacaacagatcaatccctttttatatcggtcacgtgagggcccattctggtctgccagggcccattgcacaggggaatcagagggccgatctggcaactaagatcgtggcttccaacattaataca

SEQ ID NO: 190 - DNA, 1755 bp, Synthetic construct
  source 1..1755: mol_type = other DNA
ctgaccgctgccatcgacattctggctccccagcagtgcgccgagcctatcacctggaagtcagatgaaccagtgtgggtggaccagtggccactgactaacgataagctggcagctgcccagcagctggtgcaggagcagctggaagccggacacattactgagtctagctccccttggaacacaccaatctttgtgattaagaagaagtctggcaagtggagactgctgcaggacctgagggccgtgaatgcaacaatggtgctgatgggtgctctgcagccaggactgccatcccctgtggcaatcccccagggttacctgaagattatcattgatctgaaggactgtttctttagcattcctctgcatccatccgatcagaagagattcgctttctctctgccctccaccaacttcaaggaacctatgcagaggtttcagtggaaggtgctgccacaggggatggctaattcccccaccctgtgcaacaagtatgtggctactgccatccacaaggtgagacatgcctggaagcagatgtacatcattcactatatggatgacatcctgattgcaggaaaggacggccagcaggtgctgcagtgtttcgatcagctgaagcaggagctgactgcagctggactgcatattgcccccgaaaaggtgcagctgcaggacccttacacttatctgggattcgagctgaacggcccaaagatcacaaatcagaaggcagtgattagaaaggataagctgcagaccctgaacgactttcagaagctgctgggaaagattaactggctgaggcccttcctgaagctgaccactggcgatctgaagcctctgttcgacactctgaagggcgattcagacccaaactctcacagaagcctgtccaaggaggcactggcttcactggagaaggtggaaacagccatcgcagaacagtttgtgacccatattaactattctctgccactgatcttcctgattttcaacaccgctctgactcctacaggtctgttctggcaggacaatccaatcatgtggattcacctgcccgccagccctaagaaggtgctgctgccctactatgatgctatcgccgacctgatcattctgggtagggatcatagcaagaagtactttgggatcgagccatccacaatcattcagccctattcaaagtctcagattgactggctgatgcagaataccgaaatgtggcctatcgcatgcgcttcattcgtgggcattctggataaccactaccctccaaataagctgattcagttttgtaagctgcataccttcgtgtttcctcagatcatttctaagactccactgaacaatgccctgctggtgttcacagacggatcatctaccggcatggccgcatataccctgactgatacaaccatcaagtttcagactaacctgaatagcgcacagctggtggaactgcaggctctgattgccgtgctgtccgctttcccaaaccagcccctgaatatctacacagactcagcatatctggctcactctattcccctgctggagacagtggcacagatcaagcatattagcgaatgggctaagctgttcctgcagtgccagcagctgatctacaacagatcaatccctttttatatcggtcacgtgagggcccattctggtctgccagggcccattgcacaggggaatcagagggccgatctggcaactaagatcgtggcttccaacattaataca

SEQ ID NO: 191 - DNA, 1755 bp, Synthetic construct
  source 1..1755: mol_type = other DNA
ctgaccgctgccatcgacattctggctccccagcagtgcgccgagcctatcacctggaagtcagatgaaccagtgtgggtggaccagtggccactgactaacgataagctggcagctgcccagcagctggtgcaggagcagctggaagccggacacattactgagtctagctccccttggaacacaccaatctttgtgattaagaagaagtctggcaagtggagactgctgcaggacctgagggccgtgaatgcaacaatggtgctgatgggtgctctgcagccaggactgccatcccctgtggcaatcccccagggttacctgaagattatcattgatctgaaggactgtttctttagcattcctctgcatccatccgatcagaagagattcgctttctctctgccctccaccaacttcaaggaacctatgcagaggtttcagtggaaggtgctgccacaggggatggctaattcccccaccctgtgcaacaagtatgtggctactgccatccacaaggtgagacatgcctggaagcagatgtacatcattcactatatggatgacatcctgattgcaggaaaggacggccagcaggtgctgcagtgtttcgatcagctgaagcaggagctgactgcagctggactgcatattgcccccgaaaaggtgcagctgcaggacccttacacttatctgggattcgagctgaacggcccaaagatcacaaatcagaaggcagtgattagaaaggataagctgcagaccctgaacgactttcagaagctgctgggaaagattaactggctgaggcccttcctgaagctgaccactggcgatctgaagcctctgttcgacactctgaagggcgattcagacccaaactctcacagaagcctgtccaaggaggcactggcttcactggagaaggtggaaacagccatcgcagaacagtttgtgacccatattaactattctctgccactgatcttcctgattttcaacaccgctctgactcctacaggtctgttctggcaggacaatccaatcatgtggattcacctgcccgccagccctaagaaggtgctgctgccctactatgatgctatcgccgacctgatcattctgggtagggatcatagcaagaagtactttgggatcgagccatccacaatcattcagccctattcaaagtctcagattgactggctgatgcagaataccgaaatgtggcctatcgcatgcgcttcattcgtgggcattctggataaccactaccctccaaataagctgattcagttttgtaagctgcataccttcgtgtttcctcagatcatttctaagactccactgaacaatgccctgctggtgttcacagacggatcatctaccggcatggccgcatataccctgactgatacaaccatcaagtttcagactaacctgaatagcgcacagctggtggaactgcaggctctgattgccgtgctgtccgctttcccaaaccagcccctgaatatctacacagactcagcatatctggctcactctattcccctgctggagacagtggcacagatcaagcatattagcgaaaccgctaagtggttcctgcagtgccagcagctgatctacaacagatcaatccctttttatatcggtcacgtgagggcccattctggtctgccagggcccattgcacaggggaatcagagggccgatctggcaactaagatcgtggcttccaacattaataca

SEQ ID NO: 192 - DNA, 1755 bp, Synthetic construct
  source 1..1755: mol_type = other DNA
ctgaccgctgccatcgacattctggctccccagcagtgcgccgagcctatcacctggaagtcagatgaaccagtgtgggtggaccagtggccactgactaacgataagctggcagctgcccagcagctggtgcaggagcagctggaagccggacacattactgagtctagctccccttggaacacaccaatctttgtgattaagaagaagtctggcaagtggagactgctgcaggacctgagggccgtgaatgcaacaatggtgctgatgggtgctctgcagccaggactgccatcccctgtggcaatcccccagggttacctgaagattatcattgatctgaaggactgtttctttagcattcctctgcatccatccgatcagaagagattcgctttctctctgccctccaccaacttcaaggaacctatgcagaggtttcagtggaaggtgctgccacaggggatggctaattcccccaccctgtgcaacaagtatgtggctactgccatccacaaggtgagacatgcctggaagcagatgtacatcattcactatatggatgacatcctgattgcaggaaaggacggccagcaggtgctgcagtgtttcgatcagctgaagcaggagctgactgcagctggactgcatattgcccccgaaaaggtgcagctgcaggacccttacacttatctgggattcgagctgaacggcccaaagatcacaaatcagaaggcagtgattagaaaggataagctgcagaccctgaacgactttcagaagctgctgggaaagattaactggctgaggcccttcctgaagctgaccactggcgatctgaagcctctgttcgacactctgaagcctgattcagacccaaactctcacagaagcctgtccaaggaggcactggcttcactggagaaggtggaaacagccatcgcagaacagtttgtgacccatattaactattctctgccactgatcttcctgattttcaacaccgctctgactcctacaggtctgttctggcaggacaatccaatcatgtggattcacctgcccgccagccctaagaaggtgctgctgccctactatgatgctatcgccgacctgatcattctgggtagggatcatagcaagaagtactttgggatcgagccatccacaatcattcagccctattcaaagtctcagattgactggctgatgcagaataccgaaatgtggcctatcgcatgcgcttcattcgtgggcattctggataaccactaccctccaaataagctgattcagttttgtaagctgcataccttcgtgtttcctcagatcatttctaagactccactgaacaatgccctgctggtgttcacagacggatcatctaccggcatggccgcatataccctgactgatacaaccatcaagtttcagactaacctgaatagcgcacagctggtggaactgcaggctctgattgccgtgctgtccgctttcccaaaccagcccctgaatatctacacagactcagcatatctggctcactctattcccctgctggagacagtggcacagatcaagcatattagcgaatgggctaagctgttcctgcagtgccagcagctgatctacaacagatcaatccctttttatatcggtcacgtgagggcccattctggtctgccagggcccattgcacaggggaatcagagggccgatctggcaactaagatcgtggcttccaacattaataca

SEQ ID NO: 193 - DNA, 1755 bp, Synthetic construct
  source 1..1755: mol_type = other DNA
ctgaccgctgccatcgacattctggctccccagcagtgcgccgagcctatcacctggaagtcagatgaaccagtgtgggtggaccagtggccactgactaacgataagctggcagctgcccagcagctggtgcaggagcagctggaagccggacacattactgagtctagctccccttggaacacaccaatctttgtgattaagaagaagtctggcaagtggagactgctgcaggacctgagggccgtgaatgcaacaatggtgctgatgggtgctctgcagccaggactgccatcccctgtggcaatcccccagggttacctgaagattatcattgatctgaaggactgtttctttagcattcctctgcatccatccgatcagaagagattcgctttctctctgccctccaccaacttcaaggaacctatgcagaggtttcagtggaaggtgctgccacaggggatggctaattcccccaccctgtgcaacaagtatgtggctactgccatccacaaggtgagacatgcctggaagcagatgtacatcattcactatatggatgacatcctgattgcaggaaaggacggccagcaggtgctgcagtgtttcgatcagctgaagcaggagctgactgcagctggactgcatattgcccccgaaaaggtgcagctgcaggacccttacacttatctgggattcgagctgaacggcccaaagatcacaaatcagaaggcagtgattagaaaggataagctgcagaccctgaacgactttcagaagctgctgggaaagattaactggctgaggcccttcctgaagctgaccactggcgatctgaagcctctgttcgacactctgaagcctgattcagacccaaactctcacagaagcctgtccaaggaggcactggcttcactggagaaggtggaaacagccatcgcagaacagtttgtgacccatattaactattctctgccactgatcttcctgattttcaacaccgctctgactcctacaggtctgttctggcaggacaatccaatcatgtggattcacctgcccgccagccctaagaaggtgctgctgccctactatgatgctatcgccgacctgatcattctgggtagggatcatagcaagaagtactttgggatcgagccatccacaatcattcagccctattcaaagtctcagattgactggctgatgcagaataccgaaatgtggcctatcgcatgcgcttcattcgtgggcattctggataaccactaccctccaaataagctgattcagttttgtaagctgcataccttcgtgtttcctcagatcatttctaagactccactgaacaatgccctgctggtgttcacagacggatcatctaccggcatggccgcatataccctgactgatacaaccatcaagtttcagactaacctgaatagcgcacagctggtggaactgcaggctctgattgccgtgctgtccgctttcccaaaccagcccctgaatatctacacagactcagcatatctggctcactctattcccctgctggagacagtggcacagatcaagcatattagcgaaaccgctaagtggttcctgcagtgccagcagctgatctacaacagatcaatccctttttatatcggtcacgtgagggcccattctggtctgccagggcccattgcacaggggaatcagagggccgatctggcaactaagatcgtggcttccaacattaataca

SEQ ID NO: 194 - DNA, 1755 bp, Synthetic construct
  source 1..1755: mol_type = other DNA
ctgaccgctgccatcgacattctggctccccagcagtgcgccgagcctatcacctggaagtcagatgaaccagtgtgggtggaccagtggccactgactaacgataagctggcagctgcccagcagctggtgcaggagcagctggaagccggacacattactgagtctagctccccttggaacacaccaatctttgtgattaagaagaagtctggcaagtggagactgctgcaggacctgagggccgtgaatgcaacaatggtgctgatgggtgctctgcagccaggactgccatcccctgtggcaatcccccagggttacctgaagattatcattgatctgaaggactgtttctttagcattcctctgcatccatccgatcagaagagattcgctttctctctgccctccaccaacttcaaggaacctatgcagaggtttcagtggaaggtgctgccacaggggatggctaattcccccaccctgtgcaacaagtatgtggctactgccatccacaaggtgagacatgcctggaagcagatgtacatcattcactatatggatgacatcctgattgcaggaaaggacggccagcaggtgctgcagtgtttcgatcagctgaagcaggagctgactgcagctggactgcatattgcccccgaaaaggtgcagctgcaggacccttacacttatctgggattcgagctgaacggcccaaagatcacaaatcagaaggcagtgattagaaaggataagctgcagaccctgaacgactttcagaagctgctgggaaagattaactggctgaggcccttcctgaagctgaccactggcgatctgaagcctctgttcgacactctgaagggcgatcctgacccaaactctcacagaagcctgtccaaggaggcactggcttcactggagaaggtggaaacagccatcgcagaacagtttgtgacccatattaactattctctgccactgatcttcctgattttcaacaccgctctgactcctacaggtctgttctggcaggacaatccaatcatgtggattcacctgcccgccagccctaagaaggtgctgctgccctactatgatgctatcgccgacctgatcattctgggtagggatcatagcaagaagtactttgggatcgagccatccacaatcattcagccctattcaaagtctcagattgactggctgatgcagaataccgaaatgtggcctatcgcatgcgcttcattcgtgggcattctggataaccactaccctccaaataagctgattcagttttgtaagctgcataccttcgtgtttcctcagatcatttctaagactccactgaacaatgccctgctggtgttcacagacggatcatctaccggcatggccgcatataccctgactgatacaaccatcaagtttcagactaacctgaatagcgcacagctggtggaactgcaggctctgattgccgtgctgtccgctttcccaaaccagcccctgaatatctacacagactcagcatatctggctcactctattcccctgctggagacagtggcacagatcaagcatattagcgaatgggctaagctgttcctgcagtgccagcagctgatctacaacagatcaatccctttttatatcggtcacgtgagggcccattctggtctgccagggcccattgcacaggggaatcagagggccgatctggcaactaagatcgtggcttccaacattaataca

SEQ ID NO: 195 - DNA, 1755 bp, Synthetic construct
  source 1..1755: mol_type = other DNA
ctgaccgctgccatcgacattctggctccccagcagtgcgccgagcctatcacctggaagtcagatgaaccagtgtgggtggaccagtggccactgactaacgataagctggcagctgcccagcagctggtgcaggagcagctggaagccggacacattactgagtctagctccccttggaacacaccaatctttgtgattaagaagaagtctggcaagtggagactgctgcaggacctgagggccgtgaatgcaacaatggtgctgatgggtgctctgcagccaggactgccatcccctgtggcaatcccccagggttacctgaagattatcattgatctgaaggactgtttctttagcattcctctgcatccatccgatcagaagagattcgctttctctctgccctccaccaacttcaaggaacctatgcagaggtttcagtggaaggtgctgccacaggggatggctaattcccccaccctgtgcaacaagtatgtggctactgccatccacaaggtgagacatgcctggaagcagatgtacatcattcactatatggatgacatcctgattgcaggaaaggacggccagcaggtgctgcagtgtttcgatcagctgaagcaggagctgactgcagctggactgcatattgcccccgaaaaggtgcagctgcaggacccttacacttatctgggattcgagctgaacggcccaaagatcacaaatcagaaggcagtgattagaaaggataagctgcagaccctgaacgactttcagaagctgctgggaaagattaactggctgaggcccttcctgaagctgaccactggcgatctgaagcctctgttcgacactctgaagggcgatcctgacccaaactctcacagaagcctgtccaaggaggcactggcttcactggagaaggtggaaacagccatcgcagaacagtttgtgacccatattaactattctctgccactgatcttcctgattttcaacaccgctctgactcctacaggtctgttctggcaggacaatccaatcatgtggattcacctgcccgccagccctaagaaggtgctgctgccctactatgatgctatcgccgacctgatcattctgggtagggatcatagcaagaagtactttgggatcgagccatccacaatcattcagccctattcaaagtctcagattgactggctgatgcagaataccgaaatgtggcctatcgcatgcgcttcattcgtgggcattctggataaccactaccctccaaataagctgattcagttttgtaagctgcataccttcgtgtttcctcagatcatttctaagactccactgaacaatgccctgctggtgttcacagacggatcatctaccggcatggccgcatataccctgactgatacaaccatcaagtttcagactaacctgaatagcgcacagctggtggaactgcaggctctgattgccgtgctgtccgctttcccaaaccagcccctgaatatctacacagactcagcatatctggctcactctattcccctgctggagacagtggcacagatcaagcatattagcgaaaccgctaagtggttcctgcagtgccagcagctgatctacaacagatcaatccctttttatatcggtcacgtgagggcccattctggtctgccagggcccattgcacaggggaatcagagggccgatctggcaactaagatcgtggcttccaacattaataca

SEQ ID NO: 196 - DNA, 1731 bp, Synthetic construct
  source 1..1731: mol_type = other DNA
atgattggcgccatcgagtccaacctgtttgcagatcagatttcttggaagtcagaccagcccgtgtggctgaatcagtggcctctgaagcaggagaagctgcaggctctgcagcagctggtgaccgaacagctgcagctgggccacctggaggaatctaacagcccctggaatactccagtgttcgtgattaagaagaagtctggaaagtggagactgctgcaggatctgagggcagtgaatgctaccatgcatgacatgggggctctgcagcctggactgccatctcctgtggccgtgcccaagggatgggagattatcattatcgatctgcaggactgcttctttaacatcaagctgcaccctgaagattgtaagagattcgccttttctgtgcccagccctaatttcaagagaccatatcagaggtttcagtggaaggtgctgccacagggtatgaagaactcccccacactgtgcaacaagtttgtggataaggcaattctgaccgtgagagacaagtaccaggactcatatattgtgcactacatggatgacatcctgctggcccatccttccaggtcaattgtggacgagatcctgacttccatgatccaggcactgaacaagcacgggctggtggtgtcaactgaaaagatccagaagtacgataatctgaagtacctgggcacacatatccagggtgacgccgtgtcataccagaagctgcagattagaactgataagctgaggacactgaacgacttccagaagctgctgggaaagattaattggatcagacccttcctgaagctgaccactggggagctgaagcctctgtttgaaatcctgaacggagattccaatcccatttcaatcaggaagctgacacctgaggcctgcaaggcactgcagctggtgaacgagagactgtctatcgctcgtgtgaagagactggatctgtctcggccttggagcctgtgcattctgaagaccgagtatactcccacagcctgtctgtggcagaacggagtgctggagtggattcacctgccacatatcagccccaaagtgattacaccttacgatattttctgcacccagctgattatcaagggaagacataggtccaaggagctgttttcaaaggaccctgactatatcgtggtgccatacaccaaggtgcagttcgatctgctgctgcaggagaaggaagactggccaatttccctgctgggattcctgggcgaggtgcactttcatctgcctaaggaccctctgctgaccttcactctgcagactgcaattatctttcctcacatgacatcaacaaccccactggaaaaggggattgtgatctttaccgacggctctgctaatggtagaagcgtgacttatatccagggaagggagccaattatcaaggaaaacactcagaatacagctcagcaggccgaaattgtggcagtgatcactgctttcgaggaagtgtctcagagctttaacctgtataccgattctaagtatgtgactggtctgtttcctgagattgaaacagctaccctgagcccaagaaccaaaatctacactgagctgagacacctgcagaggctgattcataagagacaggaaaagttctacattggccacatcaggggtcatacagggctgccaggacccctggcacagggtaatgcttacgccgactccctgacaaggattctgaccgct

SEQ ID NO: 197 - DNA, 1731 bp, Synthetic construct
  source 1..1731: mol_type = other DNA
atgattggcgccatcgagtccaacctgtttgcagatcagatttcttggaagtcagaccagcccgtgtggctgaatcagtggcctctgaagcaggagaagctgcaggctctgcagcagctggtgaccgaacagctgcagctgggccacctggaggaatctaacagcccctggaatactccagtgttcgtgattaagaagaagtctggaaagtggagactgctgcaggatctgagggcagtgaatgctaccatgcatgacatgggggctctgcagcctggactgccatctcctgtggccgtgcccaagggatgggagattatcattatcgatctgcaggactgcttctttaacatcaagctgcaccctgaagattgtaagagattcgccttttctgtgcccagccctaatttcaagagaccatatcagaggtttcagtggaaggtgctgccacagggtatgaagaactcccccacactgtgcaacaagtttgtggataaggcaattctgaccgtgagagacaagtaccaggactcatatattgtgcactacatggatgacatcctgctggcccatccttccaggtcaattgtggacgagatcctgacttccatgatccaggcactgaacaagcacgggctggtggtgtcaactgaaaagatccagaagtacgataatctgaagtacctgggcacacatatccagggtgacgccgtgtcataccagaagctgcagattagaactgataagctgaggacactgaacgacttccagaagctgctgggaaagattaattggatcagacccttcctgaagctgaccactggggagctgaagcctctgtttgaaatcctgaacggagattccaatcccatttcaatcaggaagctgacacctgaggcctgcaaggcactgcagctggtgaacgagagactgtctatcgctcgtgtgaagagactggatctgtctcggccttggagcctgtgcattctgaagaccgagtatactcccacagcctgtctgtggcagaacggagtgctggagtggattcacctgccacatatcagccccaaagtgattacaccttacgatattttctgcacccagctgattatcaagggaagacataggtccaaggagctgttttcaaaggaccctgactatatcgtggtgccatacaccaaggtgcagttcgatctgctgctgcaggagaaggaagactggccaatttccctgctgggattcctgggcgaggtgcactttcatctgcctaaggaccctctgctgaccttcactctgcagactgcaattatctttcctcacatgacatcaacaaccccactggaaaaggggattgtgatctttaccgacggctctgctaatggtagaagcgtgacttatatccagggaagggagccaattatcaaggaaaacactcagaatacagctcagcaggccgaaattgtggcagtgatcactgctttcgaggaagtgtctcagagctttaacctgtataccgattctaagtatgtgactggtctgtttcctgagattgaaacagctaccctgagcccaagaaccaaatggtacactgagctgagacacctgcagaggctgattcataagagacaggaaaagttctacattggccacatcaggggtcatacagggctgccaggacccctggcacagggtaatgcttacgccgactccctgacaaggattctgaccgct

SEQ ID NO: 198 - DNA, 1488 bp, Synthetic construct
  source 1..1488: mol_type = other DNA
acacttaatattgaggatgaacatagattgcacgagacctctaaggaacctgatgtttctcttggatcaacttggttgtcagatttcccacaagcatgggcagagaccggaggtatgggtcttgctgttaggcaggcaccacttattattcctttgaaggcaacctctactcctgtgtcaattaagcaatatccaatgtctcaggaagctaggcttggaattaagcctcacattcaaagacttttggatcagggtattttggtgccatgtcaatcaccttggaacacaccacttttgcctgttaagaagcctggaactaatgattacagaccagtgcaagatttgagggaggttaacaagagagtggaagatattcacccaactgttccaaacccttataatcttttgtctggattgccaccttcacatcaatggtacactgtgcttgatttgaaggatgcatttttctgccttaggttgcatccaacatctcagcctctttttgctttcgagtggagagatcctgaaatgggaatttctggtcaacttacatggaccaggttgcctcagggtttcaagaactcaccaaccttgtttaatgaggcacttcacagggatttggctgattttaggattcaacatcctgatcttatccttttgcagtatgttgatgatcttttgcttgctgcaacttctgaattggattgtcaacagggaactagggcattgcttcaaacacttggaaatttgggttacagagcttcagcaaagaaggctcagatttgccaaaagcaggttaagtatcttggatacttgcttaaggaaggacaaaggtggttgaccgaggctagaaaggaaactgtgatgggtcaaccaacacctaagacccctaggcagcttagagagttcttgggaaaggcaggtttttgtaggcttttcattccaggatttgctgaaatggctgcaccactttatcctttgaccaagcctggaactttgtttaactggggtccagatcaacagaaggcataccaagaaattaagcaggctttgcttactgctccagcacttggtttgcctgatcttacaaagccatttgagttgttcgttgatgaaaagcaaggatatgcaaagggtgtgcttacccagaagttgggaccttggagaaggcctgttgcttacctttctaagaaacttgatccagtggctgcaggttggccaccttgtcttagaatggttgctgcaattgcagtgcttacaaaggatgctggaaagttgactatgggacaacctcttgttattttggcaccacacgctgttgaggcacttgtgaagcagccacctgataggtggttgtcaaacgcaagaatgacccattatcaagctcttcttttggatactgatagggtgcagttcggtcctgttgtggctttgaatccagcaacacttttgccacttcctgaggaaggattgcaacacaactgcctt

SEQ ID NO: 199 - DNA, 1488 bp, Synthetic construct
  source 1..1488: mol_type = other DNA
accctgaatattgaggatgaatacagactgcatgagacctctaaggaacccgatgtgagcctgggaagcacttggctgagcgacttccctcaggcatgggctgagactggaggcatgggcctggccgtgaggcaggcacctctgattatcctgctgaaggccacatccaccccagtgtcaattaagcagtaccccatgaggcagaaggcaagactgggaattaagccacacatccagagactgctggatcagggcatcctggtgccttgccagtccccttggaacacacccctgctgcctgtgaagaagcctggcaccaatgattataggccagtgcaggacctgagggaggtgaacaagagagtggaagacattcatcctaccgtgcctaacccatacaatctgctgtctggtctgcctccaagccaccagtggtatactgtgctggatctgaaggacgcattcttttgtctgaggctgcatcccacatcacagcctctgttcgcttttgagtggagagatcccgaaatgggaatctccggccagctgacttggacaaggctgccccagggtttcaagaactcacctgccctgtttgatgaggcactgagaagggatctggccgatttcaggattcagcacccagacctgatcctgctgcagtatgtggatgacctgctgctggctgccacctccgaactggattgccagcagggaactagggcactgctgcagacactgggtgacctggggtatagagcctcagcaaagaaggctcagatttgtcagaagcaggtgaagtacctgggttatctgctgaaggaggggcagaggtggctgaccgaggctagaaaggaaactgtgatggggcagcccacacctaagaccccaaggcagctgagaaagttcctgggaactgctggcaattgcaggctgttcattcccggatttgccgagatggcagctccactgtaccccctgaccaagccaggaactctgtttaactggggccccgaccagcagaaggcatatcaggaaatcaagcaggctctgctgactgctcctgccctgggcctgcctgatctgacaaagcccttcgagctgtttgtggacgaaaagcagggttacgctaagggggtgctgacccagaagctgggtccttggagaaggcccgtggcctatctgtctaagaagctggaccctgtggctgcaggatggcccccttgcctgagaatggtggctgccattgctgtgctgacaaaggacgccggaaagctgactatgggacagcctctggttattggggcaccacatgctgtggaagccctggtgaagcagccacccgataggtggctgagcaaggccagaatgacccactaccaggcactgctgctggatactgacagggtgcagttcggccccgtggtggctctgaatcctgccactctgctgccactgcccgaggaaggtctgcagcataactgtctg

SEQ ID NO: 200 - DNA, 1488 bp, Synthetic construct
  source 1..1488: mol_type = other DNA
accgtgtccctgcaggatgagcacagactgttcgacatccctgtgaccacttcactgccagacgtgtggctgcaggactttcctcaggcttgggctgaaaccggaggcctgggtagggcaaagtgccaggcaccaattatcattgatctgaagcctactgccgtgccagtgtctatcaagcagtaccctatgagcctggaggcacacatgggtattagacagcatatcattaagttcctggaactgggggtgctgagaccctgtaggtctccttggaacacacccctgctgcctgtgaagaagccaggaacccaggattacaggcccgtgcaggacctgagggagatcaataagagaacagtggatattcatcctaccgtgcccaacccttataatctgctgtccaccctgaagccagactactcatggtatactgtgctggatctgaaggacgctttcttttgcctgcctctggctcctcagagccaggagctgttcgctttcgagtggaaggaccctgagagaggtatctctgggcagctgacatggaccaggctgcctcagggattcaagaatagcccaaccctgtttgacgaggccctgcacagggatctgactgacttcagaacacagcatccagaagtgacactgctgcagtatgtggatgacctgctgctggctgcccccaccaagaaggcatgcactcagggcacaagacacctgctgcaggagctgggagaaaagggctatagggcatccgctaagaaggctcagatttgccagaccaaagtgacttacctgggttatattctgtcagaggggaagaggtggctgactcccggaagaatcgaaacagtggctaggattcctccacccagaaaccctagggaggtgagagagttcctgggtacagccgggttttgtagactgtggattcccggctttgctgagctggcagctcctctgtatgccctgaccaaggaatccacacctttcacctggcagactgaacatcagctggcttttgaggccctgaagaaggctctgctgtctgcccctgcactgggactgccagatacaagcaagcccttcaccctgtttctggacgagagacagggaatcgcaaagggcgtgctgactcagaagctgggtccttggaagaggcccgtggcttacctgtctaagaagctggaccctgttgctgcaggatggcctccatgcctgaggattatggctgccaccgcaatgctggtgaaggactctgctaagctgactctgggtcagcccctgacagtgatcacccctcacactctggaggctattgtgaggcagccccctgatagatggatcactaatgccagactgacacattatcaggcactgctgctggatactgacagggtgcagtttgggccacccgtgaccctgaaccctgccactctgctgccagtgcccgaaaatcagccttccccacacgactgtagacag

SEQ ID NO: 201 - DNA, 1488 bp, Synthetic construct
  source 1..1488: mol_type = other DNA
ctggtgctgaacctggaggaagagtacagactgaacgagaagcctgtgcctccatccattgatccatcatggctgcagctgttccctatggtgtgggctgaaaaggccggtatggggctggccaatcaggtgccccctgtggtggtggagctgaagtctgatgccagccctgtggcagtgagacagtacccaatgtctaaggaagctagagagggtattaggcctcatatccagaggtttctggacctggggattctggtgccctgccagagcccttggaacaccccactgctgcccgtgaagaagcccggcactaatgattataggcctgtgcaggacctgagagaagtgaacaagagggtgcaggatattcacccaactgtgccaaacccctacaatctgctgtctagcctgccaccctctcatacatggtatagcgtgctggatctgaaggacgccttcttttgtctgaagctgcacccaaactcccagcccctgttcgctttcgagtggagagatcctgagaagggaaacaccggccagctgacttggacaaggctgccacagggattcaagaactctcccactctgtttgatgaggccctgcatagagacctggcttcattcagggccctgaatcctcaggttgtgatgctgcagtatgtggatgacctgctggtggctgccccaacctatagagactgcaaggaaggaactagaaggctgctgcaggagctgtccaagctgggctacagagtgtcagcaaagaaggctcagctgtgcagggaagaggtgacatacctgggttatctgctgaagggaggcaagagatggctgaccccagccaggaaggcaactgtgatgaagattcctacaccaaccactcccagacaggtgagggagttcctgggtactgcagggttttgcagactgtggattcctgggttcgcttccctggcagctcctctgtatccactgacaagagaaaaggtgcctttcacctggactgaagcacaccaggaggcttttggaaggattaaggaggctctgctgtcagctcccgccctggcactgcctgatctgaccaagccatttgccctgtatgtggatgaaaaggagggagtggcaaggggcgtgctgacacagaccctgggtccttggagaaggccagtggcttatctgtctaagaagctggaccctgttgccagcggatggccaacatgcctgaaggctatcgccgcagtggccctgctgctgaaggatgctgacaagctgaccctgggccagaacgtgctggttattgcccctcacaatctggaaagcatcgtgagacagcctccagacaggtggatgacaaatgcaagaatgacccattaccagtccctgctgctgaacgagagggtgtcattcgctccccctgccattctgaatcccgctactctgctgcctgtggaatctgatgacacaccaattcatatctgtagcgag

SEQ ID NO: 202 - DNA, 1488 bp, Synthetic construct
  source 1..1488: mol_type = other DNA
accctgaatattgaggatgaatacagactgcacgagacctccaagggacccgatgtgcctctgggctctacttggctgagcgacttccctcaggcatgggctgaaaccggaggcatgggcctggccgtgaggcaggcacccctgattatccctctgagagctgcctccactccagtgtctattaagcagtacccaatgtctagggaggccagactgggaattaagccacatatccagagactgctggatcagggcatcctggtgccatgccagagcccctggaacacaccactgctgcccgtgaagaagcccgggaccaatgattataggcctgtgcaggacctgagggaggtgaacaagagagtggaagacattcacccaaccgtgcctaacccatacaatctgctgtctggactgcctccaagccatcagtggtatactgtgctggatctgaaggacgcattcttttgtctgaggctgcaccccacatcccagtcactgttcgcttttgagtggagagaccctgaaatgggtatctccgggcagctgacatggaccaggctgccacagggcttcaagaactcacccacactgtttgatgaggcactgcacagggatctggctgatttcaggattcagcatcctgacctgatcctgctgcagtatgtggatgacctgctgctggcagctacctccgaactggattgccagcagggtactagggctctgctgcagacactgggagacctgggctatagagcctcagcaaagaaggcccagatttgccagaagcaggtgaagtacctgggttatctgctgaaggaggggcagaggtggctgaccgaggctagaaaggaaactgtgatgggccagcccacccctaagactccaaggcagctgagagagttcctgggaaccgctgggttttgcaggctgtggattcccggtttcgccgaaatggccgcacctctgtacccactgactaagacaggaaccctgtttaagtggggcccagatcagcagaaggcttatcaggaaatcaagcaggccctgctgactgctcccgccctgggtctgcctgatctgacaaagccattcgagctgtttgtggacgaaaagcagggatacgccaagggcgtgctgactcagaagctgggaccttggagaaggccagtggcatatctgtctaagaagctggaccctgtggctgctggatggcccccttgcctgagaatggtggcagctattgccgtgctgacaaaggacgcaggaaagctgactatgggacagcccctggttattctggcacctcacgctgtggaggccctggtgaagcagccacccgacaggtggctgagcaatgcaagaatgacccattaccaggctctgctgctggatactgacagggtgcagttcgggccaattgtgaccctgaaccctgccactctgctgccactgcctgaggaaggtctgcagcacgattgtctg

SEQ ID NO: 203 - DNA, 1497 bp, Synthetic construct
  source 1..1497: mol_type = other DNA
accgctcctctggaggaagagtacagactgttcctggaagcacctattcagaacgtgactctgctggagcagtggaagagggaaattcctaaagtgtgggccgagatcaatcctccaggactggcttccacacaggccccaattcacgtgcagctgctgtcaaccgccctgcccgtgagagtgaggcagtaccctatcacactggaggcaaagaggtctctgagggaaaccattagaaagtttagggctgccggaatcctgagacccgtgcacagcccttggaacactccactgctgcccgtgagaaagtccggcacatcagagtataggatggtgcaggatctgagagaggtgaacaagagggtggaaaccattcatcctactgtgccaaatccctacaccctgctgtctctgctgccccctgacagaatctggtatagcgtgctggatctgaaggacgctttcttttgcattcctctggccccagagtcccagctgatcttcgcctttgaatgggcagatgctgaagagggagagtctggccagctgacctggactaggctgccacagggattcaagaacagccccactctgtttgatgaagctctgaatagagacctgcagggcttcaggctggaccacccatctgtgagcctgctgcagtatgtggatgacctgctgattgcagctgatacacaggccgcatgcctgtccgccactagagacctgctgatgacactggcagagctgggttacagggtgtcagggaagaaggcccagctgtgccaggaagaagtgacttatctgggttttaagatccataaggggtccagatcactgtctaacagcaggacacaggctattctgcagatccctgtgccaaagaccaagagacaggtgagggagttcctgggtactattgggtactgtagactgtggattcctggttttgcagagctggctcagccactgtatgctgccacaaggggaggcaatgatcctctggtgtggggagagaaggaagaggaagcattccagtctctgaagctggctctgactcagccacccgccctggcactgccttccctggacaagccattccagctgtttgtggaggaaacctcaggagcagctaagggcgtgctgactcaggctctgggtccttggaagagacccgtggcctacctgtctaagagactggaccctgttgctgcaggatggccaagatgcctgagggcaatcgctgccgcagctctgctgaccagagaggcttctaagctgaccttcggacaggacattgaaatcacctctagccataacctggagtccctgctgagatcacctccagacaagtggctgacaaatgccaggattacccagtatcaggtgctgctgctggaccctcctagagtgagattcaagcagacagccgcactgaaccccgctaccctgctgcctgagaccgatgacactctgccaatccaccattgtctggat

SEQ ID NO: 204 - DNA, 1284 bp, Synthetic construct
  source 1..1284: mol_type = other DNA
cctatttctccaatcgagaccgtgcctgtgaagctgaagccaggcatggatggccccaaggtgaagcagtggccactgacagaggaaaagattaaggctctggtggagatttgcaccgagatggaaaaggagggaaagatttctaagattgggcccgaaaacccttacaataccccagtgttcgctattaagaagaaggattcaactaagtggagaaagctggtggacttcagagaactgaacaagaggactcaggacttttgggaagtgcagctgggcattcctcaccctgcaggactgaagaagaagaagtctgtgacagtgctggatgtgggagacgcttacttttcagtgccactggatgaagacttcagaaagtatacagcctttaccattccatctatcaacaatgagacccccggaattagataccagtataacgtgctgcctcagggttggaaggggagcccagcaattttccagtctagcatgactaagatcctggagccctttagaaagcagaatcctgatattgtgatctaccagtatatggatgacctgtatgtgggtagcgacctggaaattgggcagcacaggactaagatcgaggaactgagacagcatctgctgagatggggtctgaccactccagataagaagcaccagaaggaacctccattcctgtggatggggtacgagctgcatcccgacaagtggactgtgcagccaattgtgctgcccgagaaggattcttggacagtgaacgacatccagaagctggtgggaaagctgaattgggccagccaaatctaccccggcatcaaggtgagacagctgtgcaagctgctgaggggtactaaggcactgacagaagtgattcctctgaccgaggaagctgaactggagctggccgaaaacagggagatcctgaaggaacccgtgcacggcgtgtactatgatccttccaaggacctgattgctgagatccagaagcagggtcaggggcagtggacctaccaaatctaccaggaacctttcaagaacctgaagactggaaagtacgcaagaatgaggggcgctcataccaatgatgtgaagcagctgactgaagcagtgcagaagattacaaccgagtcaattgtgatctggggaaagacacctaagtttaagctgccaatccagaaggaaacttgggagacatggtggaccgagtattggcaggctacttggattcctgaatgggagttcgtgaatacaccccctctggtgaagctgtggtatcag

SEQ ID NO: 205 - DNA, 1722 bp, Synthetic construct
  source 1..1722: mol_type = other DNA
atgaatccactgcagctgctgcagccactgcctgcagaaatcaagggaaccaagctgctggctcactgggattccggggccactatcacatgcattcctgaatcatttctggaggacgaacagccaattaagaagacactgatcaagaccattcatggtgaaaagcagcagaacgtgtactatgtgactttcaaggtgaaggggagaaaggtggaggctgaagtgatcgcctccccctacgagtatattctgctgtcaccaacagatgtgccctggctgacccagcagcctctgcagctgacaatcctggtgccactgcaggagtaccaggaaaagattctgtctaagactgctctgccagaagatcagaagcagcagctgaagacactgtttgtgaagtatgacaatctgtggcagcactgggagaaccaagtgggacacagaaagattaggccacataatatcgctacaggcgactaccctccaaggccccagaagcagtatcctattaacccaaaggccaagccttccattcagatcgtgattgatgacctgctgaagcagggtgtgctgacccctcagaactctaccatgaacaccccagtgtaccctgtgccaaagcccgatgggagatggaggatggtgctggactatagagaagtgaataagactatcccactgacagctgcccagaaccagcactctgcaggaatcctggctactattgtgaggcagaagtacaagaccactctggatctggccaatggcttttgggcacatcccattacacctgaatcctactggctgactgcattcacatggcagggaaagcagtattgttggaccagactgccacagggattcctgaactctcccgccctgttcactgcagatgtggtggacctgctgaaggagatccctaacgtgcaggtgtatgtggatgacatctacctgagccacgatgacccaaaggagcatgtgcagcagctggaaaaggtgtttcagatcctgctgcaggctggatatgtggtgtctctgaagaagagcgagatcggtcagaagaccgtggagttcctggggtttaatattactaaggaaggaagaggcctgaccgatactttcaagactaagctgctgaacattacaccccctaaggacctgaagcagctgcagtctatcctgggtctgctgaacttcgccaggaacttcattccaaacttcgcagagctggtgcagcccctgtacaatctgatcgcctctgcaaaggggaagtatattgagtggagcgaggaaaataccaagcagctgaacatggttattgaagctctgaatactgccagcaacctggaggaaagactgccagagcagagactggttattaaggtgaacacttccccctcagcaggatacgtgagatactataatgagacaggcaagaagcctatcatgtacctgaactacgtgttctctaaggctgagctgaagttcagcatgctggaaaagctgctgacaaccatgcacaaggcactgattaaggctatggatctggctatgggacaggaaattctggtgtactccccaatcgtgtcaatgaccaagattcagaagactcctctgccagagagaaaggctctgcctatcaggtggattacctggatgacttacctggaagatccaaggattcagtttcactatgacaagacactgcccgagctgaagcat

SEQ ID NO: 206 - DNA, 1317 bp, Synthetic construct
  source 1..1317: mol_type = other DNA
ctgaccgctgccatcgacattctggctccccagcagtgcgccgagcctatcacctggaagtcagatgaaccagtgtgggtggaccagtggccactgactaacgataagctggcagctgcccagcagctggtgcaggagcagctggaagccggacacattactgagtctagctccccttggaacacaccaatctttgtgattaagaagaagtctggcaagtggagactgctgcaggacctgagggccgtgaatgcaacaatggtgctgatgggtgctctgcagccaggactgccatcccctgtggcaatcccccagggttacctgaagattatcattgatctgaaggactgtttctttagcattcctctgcatccatccgatcagaagagattcgctttctctctgccctccaccaacttcaaggaacctatgcagaggtttcagtggaaggtgctgccacaggggatggctaattcccccaccctgtgccagaagtatgtggctactgccatccacaaggtgagacatgcctggaagcagatgtacatcattcactatatggatgacatcctgattgcaggaaaggacggccagcaggtgctgcagtgtttcgatcagctgaagcaggagctgactgcagctggactgcatattgcccccgaaaaggtgcagctgcaggacccttacacttatctgggattcgagctgaacggcccaaagatcacaaatcagaaggcagtgattagaaaggataagctgcagaccctgaacgactttcagaagctgctgggagatattaactggctgaggccctacctgaagctgaccactggcgatctgaagcctctgttcgacactctgaagggcgattcagacccaaactctcacagaagcctgtccaaggaggcactggcttcactggagaaggtggaaacagccatcgcagaacagtttgtgacccatattaactattctctgccactgatcttcctgattttcaacaccgctctgactcctacaggtctgttctggcaggacaatccaatcatgtggattcacctgcccgccagccctaagaaggtgctgctgccctactatgatgctatcgccgacctgatcattctgggtagggatcatagcaagaagtactttgggatcgagccatccacaatcattcagccctattcaaagtctcagattgactggctgatgcagaataccgaaatgtggcctatcgcatgcgcttcattcgtgggcattctggataaccactaccctccaaataagctgattcagttttgtaagctgcataccttc

SEQ ID NO: 207 - DNA, 1323 bp, Synthetic construct
  source 1..1323: mol_type = other DNA
atgattggcgccatcgagtccaacctgtttgcagatcagatttcttggaagtcagaccagcccgtgtggctgaatcagtggcctctgaagcaggagaagctgcaggctctgcagcagctggtgaccgaacagctgcagctgggccacctggaggaatctaacagcccctggaatactccagtgttcgtgattaagaagaagtctggaaagtggagactgctgcaggatctgagggcagtgaatgctaccatgcatgacatgggggctctgcagcctggactgccatctcctgtggccgtgcccaagggatgggagattatcattatcgatctgcaggactgcttctttaacatcaagctgcaccctgaagattgtaagagattcgccttttctgtgcccagccctaatttcaagagaccatatcagaggtttcagtggaaggtgctgccacagggtatgaagaactcccccacactgtgccagaagtttgtggataaggcaattctgaccgtgagagacaagtaccaggactcatatattgtgcactacatggatgacatcctgctggcccatccttccaggtcaattgtggacgagatcctgacttccatgatccaggcactgaacaagcacgggctggtggtgtcaactgaaaagatccagaagtacgataatctgaagtacctgggcacacatatccagggtgacgccgtgtcataccagaagctgcagattagaactgataagctgaggacactgaacgacttccagaagctgctgggaaacattaattggatcagacccttcctgaagctgaccactggggagctgaagcctctgtttgaaatcctgaacggagattccaatcccatttcaatcaggaagctgacacctgaggcctgcaaggcactgcagctggtgaacgagagactgtctatcgctcgtgtgaagagactggatctgtctcggccttggagcctgtgcattctgaagaccgagtatactcccacagcctgtctgtggcagaacggagtgctggagtggattcacctgccacatatcagccccaaagtgattacaccttacgatattttctgcacccagctgattatcaagggaagacataggtccaaggagctgttttcaaaggaccctgactatatcgtggtgccatacaccaaggtgcagttcgatctgctgctgcaggagaaggaagactggccaatttccctgctgggattcctgggcgaggtgcactttcatctgcctaaggaccctctgctgaccttcactctgcagactgcaattatctttcctcacatg

SEQ ID NO: 208 - protein, 427 aa, Petunia vein clearing virus
NENINPTKASHSGMNPEHLQLAIKECDELQQFDLIEPSDSQWACEAFYVNKRSEQVRGKLRLVINYQPLNHFLQDDKFPIPNKLTLFSHLSKAKLFSKFDLKSGFWQLGIHPNERPKTGFCIPDRHFQWKVMPFGLKTAPSLFQKAMIKIFQPILFSALVYIDDILLFSETLEDHIKLLNQFISLVKKFGVMLSAKKMILAQNKIQFLGMDFADGTFSPAGHISLELQKFPDTNLSVKQIQQFLGIVNYIRDFIPEVTEHISPLSDMLKKKPPAWGKCQDNAVKQLKQLAQQVKSLHIPSEGKKILQTDASDQYWSAVLLEEHNGKRKICGFASGKFKVSEQHYHSTFKEILAVKNGIKKFNFFLIHTNFLVEMDMRAFPKMIRLNPKIVPNSQLLRWAQWFSPYQFEVKHLKGKDNILADFLSRPH

SEQ ID NO: 209 - protein, 485 aa, Citrus endogenous pararetrovirus
KLPFKLNEDINPTKATHPGMSPSDLLLAQQECSQLLAQGLIEPTTSQWACQAFYVEKHSEIVRGKKRLVIDYQPLNMFLQDDKFPLPRRQSMFTFLKNAQIFSKFDLKSGFWQLGIEPSERYKTAFCIPNAHFQWTVLPFGLKTAPSIFQKSMIKIFQPLLSNALIYIDDILLFSGSHDDHHRLLNQFYDIVHSHGIMLSAKKSTIATDTIEFLGMIIKDGHYQPGKHVAQELLHFPDQQLSKKQVQQFLGIINYIRDFIPHVDHYTRHLSALLKKKPPEWNDDHTNAVTTLKKIAQNPPPKHQTHPTKKILQTDASDQYWSAVLLEEHNGKRHFCAHASGQFKHSEKNYHVIYKEILTVKYGIKKFEFHLISHTFLINMDNSSFPRIFDFKNKLLLDKQLLNLKTWFAKYDFTVQHIKGNQNLIPDFLTRPAINKPSLISSIQTIPVIALNRQLPFKALTQRHFPMNISFQSAYQLQDFTKKFL

SEQ ID NO: 210 - protein, 679 aa, Cauliflower mosaic virus
MDHLLLKTQTQTEQVMNVTNPNSIYIKGRLYFKGYKKIELHCFVDTGASLCIASKFVIPEEHWVNAERPIMVKIADGSSITISKVCKDIDLIIAGEIFKIPTVYQQESGIDFIIGNNFCQLYEPFIQFTDRVIFTKNKSYPVHIAKLTRAVRVGTEGFLEAMKKRSKTQQPEPVNISTNKIENPLEEIAILSEGRRLSEEKLFITQQRMQKIEELLEKVCSENPLDPNKTKQWMKASIKLSDPSKAIKVKPMKYSPMDREEFDKQIKELLDLKVIKPSKSPHMAPAFLVNNEAEKRRGKKRMVVNYKAMNKATVGDAYNLPNKDELLTLIRGKKIFSSFDCKSGFWQVLLDQESRPLTAFTCPQGHYEWNVVPFGLKQAPSIFQRHMDEAFRVFRKFCCVYVDDILVFSNNEEDHLLHVAMILQKCNQHGIILSKKKAQLFKKKINFLGLEIDEGTHKPQGHILEHINKFPDTLEDKKQLQRFLGILTYASDYIPKLAQIRKPLQAKLKENVPWKWTKEDTLYMQKVKKNLQGFPPLHHPLPEEKLIIETDASDDYWGGMLKAIKINEGTNTELICRYASGSFKAAERNYHSNDKETLAVINTIKKFSIYLTPVHFLIRTDNTHFKSFVNLNYKGDSKLGRNIRWQAWLSHYSFDVEHIKGTDNHFADFLSREFNKVNS

SEQ ID NO: 211 - protein, 449 aa, Cauliflower mosaic virus
KQWMKASIKLSDPSKAIKVKPMKYSPMDREEFDKQIKELLDLKVIKPSKSPHMAPAFLVNNEAEKRRGKKRMVVNYKAMNKATVGDAYNLPNKDELLTLIRGKKIFSSFDCKSGFWQVLLDQESRPLTAFTCPQGHYEWNVVPFGLKQAPSIFQRHMDEAFRVFRKFCCVYVDDILVFSNNEEDHLLHVAMILQKCNQHGIILSKKKAQLFKKKINFLGLEIDEGTHKPQGHILEHINKFPDTLEDKKQLQRFLGILTYASDYIPKLAQIRKPLQAKLKENVPWKWTKEDTLYMQKVKKNLQGFPPLHHPLPEEKLIIETDASDDYWGGMLKAIKINEGTNTELICRYASGSFKAAERNYHSNDKETLAVINTIKKFSIYLTPVHFLIRTDNTHFKSFVNLNYKGDSKLGRNIRWQAWLSHYSFDVEHIKGTDNHFADFLSREFNKVNS

SEQ ID NO: 212 - protein, 311 aa, Cauliflower mosaic virus
KQWMKASIKLSDPSKAIKVKPMKYSPMDREEFDKQIKELLDLKVIKPSKSPHMAPAFLVNNEAEKRRGKKRMVVNYKAMNKATVGDAYNLPNKDELLTLIRGKKIFSSFDCKSGFWQVLLDQESRPLTAFTCPQGHYEWNVVPFGLKQAPSIFQRHMDEAFRVFRKFCCVYVDDILVFSNNEEDHLLHVAMILQKCNQHGIILSKKKAQLFKKKINFLGLEIDEGTHKPQGHILEHINKFPDTLEDKKQLQRFLGILTYASDYIPKLAQIRKPLQAKLKENVPWKWTKEDTLYMQKVKKNLQGFPPLHHPL

SEQ ID NO: 213 - protein, 635 aa, Tobacco vein clearing virus
MKIYILAKIIVEGYYNRYYTPMIDTGAEANICKYNCLPTDKWEKLKTPMVVTGFNNEGSMINYKARNVKIQIWDKILTIEEIYNFEFTTKDMLLGMPFLEKLYPHIITKTHWWFTTPCKNKVGAKRVNNKQRKTTEWIRGSEKITQKLENINKNTTTQLEIIIFTIDKVKIIQKKLEKLYNDNPLQGWEKHKTKVKIELIEENSIITQKPLKYNFNDLTEFKIHIKDLLDNKYIQESNSKHTSPAFIVNKHSEQKRGKSRMVIDYRNLNAKTKTYNYPIPNKILKIRQIQGYNYFSKFDCKSGFYHLKLEDESKKLTAFTVPQGFYEWNVLPFGYKNAPGRYQHFMDNYFNQLENCIVYIDDILLYSRTQDEHIKLLEKFAHIIENSGISLSKTKAEIMKNQIEFLGIQIDKNGIKMQTHIVQKIINLDENIDTKKKLQSFLGIVNQVREYIPKLAENLKPLQKKLKKDVEYSFDEKDKEQIKKIKILCKKLPKLYFPDENKKFTYIVETDSSNYSYGGVLKYRYNKEKIEHHCRYYSGSYTEPQEKWEINRKELFALYKCLLAFEPYIVYTRFIVRTDNTQVKWWITRKVQDSVTTKEIRRLVLNILNFTFTIEIINTNKNVVADYLSRQSYPN

SEQ ID NO: 214 - protein, 477 aa, Rice tungro bacilliform virus
QPILGYKNEIGNQSLITMVKELEALGFIGDDITKNRTTWVCDFKIINPDINITCATIPYTPADKEVFEKQIKELLDNKLIKKADPTCRHRTAAFIVRNHSEEVAQKPRIVYNYKRLNDNMHTDPFNIPHKISMINLIQKANIFSKFDLKAGFHHMKLKDDFKDWTTFTCSEGLYTWNVCPFGIANAPCAFQRFMQESFGDLKFALLYIDDILIASNNEKEHIEHLKIFFNRVKEVGCVLSKKKSKMFLKEVEYLGVEIKEGKISLQPHIVDKIKKFDKNKLNTLKGLQAYLGLLNYARGYIKDLSKLVGPLYKKTGKNGQRIFNKEDWNIIFKIEREVSKIKPLERPKETDYIIIETDASEEGWGAVLVCKPDKYSGKDTEKIAGYASGNFGEKKTWTSLDYEIEAINEALNKFQIYLDKDFTIRTDCEAIVKGIKTEDYKKRSKTRWIKLRDNLLKDGYKPTFEHIKGNKNFLPNF

SEQ ID NO: 215 - protein, 487 aa, Commelina yellow mottle virus
ETPSFLDQEFARKNKDLLKEMKEMKYIGENPMEFWKNNKIKCKLNIINPDIKIMGRPIKHVTPGDEEAMTRQINLLLQMKVIRPSESKHRSTAFIVRSGTEIDPITGKEKKGKERMVFNYKLLNENTESDQYSLPGINTIISKVGRSKIYSKFDLKSGFWQVAMEEESVPWTAFLAGNKLYEWLVMPFGLKNAPAIFQRKMDNVFKGTEKFIAVYIDDILVFSETAEQHSQHLYTMLQLCKENGLILSPTKMKIGTPEIDFLGASLGCTKIKLQPHIISKICDFSDEKLATPEGMRSWLGILSYARNYIQDIGKLVQPLRQKMAPTGDKRMNPETWKMVRQIKEKVKNLPDLQLPPKDSFIIIETDGCMTGWGAVCKWKMSKHDPRSTERICAYASGSFNPIKSTIDAEIQAAIHGLDKFKIYYLDKKELIIRSDCEAIIKFYNKTNENKPSRVRWLTFSDFLTGLGITVTFEHIDGKHNGLADALS

SEQ ID NO: 216 - protein, 470 aa, Soybean Putnam virus
EIVTQKLFSIQQDHLSKIHNLLDRVCSENPIDPEKSKRWMTASIKLKDPNTIVKVKPMQYNPDDRMEFSKQIKELLDLKIIIPSKSPHQSPAFLVENEAERRRGKKRMVVNYKKINEATIGDSHNLPNKDELLTLIRGKTIYSSFDCKSGFWQVFLDQESQLLTAFTCPSGHYQWRVVPFGLKQAPSIFQRHMQNAFRSFEKFCCVYVDDILVFSDNEQDHHRHVMALLQRCNQLGIILSKKKAQLFQEKINFLGLEIDQGSHKPQNHILEHIHKFPDKIEDKKQLQRFLGILTYASDYIPKLAEIRKPLQSKLKKDVPWTWTHDDINYMSKIKKNLKSFPTLYHPKLTDTLIIETDASGSFWGGILKARTENSDSELICRYTSGSFKAAELNYHSNEKEILAVMNTIKKFTGYLTPVKFLIRTDNKNFTHFLKINLKGDYKQGRLVRWQMWFSRYVFEVEHLSGDKNVF

SEQ ID NO: 217 - protein, 458 aa, Citrus blight-associated pararetrovirus
QSYQDISTKLLSFCPESHSEFTHPNPLWKNKSFFIKLPFKLNEDINPTKAALPRMSPSDLLLAQKECSQLLVQGLIEPTSSQWACQAFYVEKHYEIVREKKRLVIDYQPLNMFLQDDKFPFPRRQSMFTFLKNAQIFSKFDLKSGFWQLGIEPSECYKTTFCIPNAHFQWTVLPFGLKTSSSIFQKSMVQIFQPILHHALIYIDDILLFSGSYNEHRQLLTQFYDIIQSHGIMLSAKKSTIATDNIEFLGMIIKDRHYQLGKHIAQELLHFPDQHLSKKQVQQLLGIINYIRDFIPHVDHYTHHLSALLKKKPPEWNADHTFAVTTLKQIAQNPPPLKLITDGKRILQTDASDESWGAILLEEINGKENFIAYASGHFSDTQKHYHSVFKEILAVKNGIKKFEYHLIGHHFLIRMDSSAFPNIFHFKGKTVPEKMLLRLKDWFSKYDFSVKHIKGSQN

SEQ ID NO: 218 - protein, 473 aa, Cassava vein mosaic virus
SRNPIEEEINQILGTDIYGENPLEKWEKHKTLAKIELKNETDNIYKPPMLYQETDLPEFKMHIEEMIKEGFIEEKTNFEDKKYSSPAFIVNKHSEQKRGKTRMVIDYKDLNKKAKVVKYPIPNKDTLIHRSIQARYYSKFDCKSGFYHIKLEEDSKKYTAFTVPQGYYQWKVLPFGYHNSPSIFQQFMDRIFRPYYDFIIVYIDDILVFSKTIEEHKIHIAKFRDITLANGLIISKKKTELCKEKIDFLGVQIEQGGIELQPHIINKILEKHTKIKNKTELQSILGLLNQIRHFIPHLAQILLPIQKKLKIKDEEIWTWTKEDEEKIKLIQDYSKNLVIKMKYPINKEDMNWIIEVDASNNAYGSCLKYKPKNSKIEYLCRYNSGTFKENEQKYDINRKELIAVYQGLQSYSLFTCEGNKLVRTDNSQVYYWIKNDTNKKSIEFRNIKYLLAKIAVYNFEIQLIDGKTNIIAD

SEQ ID NO: 219 - protein, 471 aa, Rudbeckia flower distoion virus
EDSDDYFVYSIQRHNTIVNDLLTQACSENPLDENKNHNGLLAEIKLINPATTVNVKSMAYSPDDAVEINKQIQELLEIKVIRPSRSPHSSPCFLVQNHNEIKRGKKRLVINYKALNAATISDGYLLPNKETILTAIRGRKYFSTLDCKSGFWQIRLNENSKPLTAFSCPMGQYEWNVVPFGLKQAPGLFQRFMDNSFKEYSAFCAVYVDDILVFSKTLDEHYDHLETVLRKCIETGIILSKKKAEVAKTKINYLGFTISNGEIELQSHILENIKLFPSRIPDKKSLQRFLGILTYADQYIRKLAEWRKPLQRKLKKDTVWEWNDSDTQYVEKFKRNLKEFPKLHHPLPDEYLIIETDASHEHWAGVLKSRGTDNLERLCRYTSGSFKPAEINYHSNEKEVLAVKRTITKFKGYLASSEFLVRTDNKYFTYFLRTSIKDDYKQGRLIRWQQWFSHYKFNVEHLAGTHNFTAD

SEQ ID NO: 220 - protein, 485 aa, Oryza sativa
APNWYRDIKSKRDIEKIIQRLEDIQIIGEIPMKYWEKNAIECKINIINPEYIIKTSPIEATPKDIEEFKMHIEELLKLGAIRESRSPHRSAAFIVRNHAEEVRGKSRMVINYKRLNDNTIEDAYNIPNKQEWINRIQGSKYFSKFDLKAGFWQVKMAEESIEWTAFTCPQGHYEWLVMPLGLKNAPAIFQRKMQNIFNENQEFILVYIDDLLVFSRTYKEHIAHLEIFFRKVEQNGLILSKKKMEICKEKINFLGHEIGEGKIHLQEHIAKKILEFPDAMNDKKKLQQFLGLVNYARNHINNLAKLAGPLYAKLRKNGQRYFNSEDIKLVRLIKERVKELKPLELPLEESYFIIETDASQLGWGAVLKQRPTKYSSKSEEKVCRYASGSYKLKTVGNTDREILAIINAINAFRLYLGFKEFTVRTDCEAICRYYNQLNSKKSSTRRWILFEDIITGNGYKVIFEHIKGKDNHLPDLLSRLPILQE

SEQ ID NO: 221 - protein, 484 aa, Zea mays
HYSFVSSIEPFRVEEALLDPDWVLAMQEELNNFKRNEVWTLVPRPKQNVVGTKWVFRNKQDEHGVVTRNKARLVAKGYAQVAGLDFEETFAPVARLESIRILLAYAAHHSFRLYQMDVKSAFLNGPIKEEVYVEQPPGFEDERYPDHVCKLSKALYGLKQAPRAWYECLRDFLIANAFKVGKADPTLFTKTCDGDLFVCQIYVDDIIFGSTNQKSCEEFSRVMTQKFEMSMMGELNYFLGFQVKQLKDGTFISQTKYTQDLLKRFGMKDAKPAKTPMGTDGHTDLNKGGKSIDQKAYRSMIGSLLYLCASRPDIMLSVCMCARFQSDPKECHLVAVKRILRYLVATPCFGLWYPKGSTFDLVGYSDSDYAGCKVDRKSTSGTCQFLGRSLVSWNSKKQTSVALSTAEAEYVAAGQCCAQLLWMRQTLRDFGYNLSKVPLLCDNESAIRMAENPVEHSRTKHIDIRHHFLRDHQQKGDIEVFHVS

SEQ ID NO: 222 - protein, 491 aa, Zea mays
FIVYLVDDTPTTIAEAFASSDADDWKEAVHNEMDSILSNGTWEITDRPYGCKPVGCKWVFKKKLKPDGTIEKYKARLVAKGYTQKEGEDFFDTYSPVARMTTIRVLLSLAASYGLLVHQMDVKTAFLNGELDEEIYMEQPDGFVVKGQESKVCKLLKSLYGLKQAPKQWHEKFDTTLTSAGFAINEADRCVYYRCGGGEGVILCLYVDDILIFGTNIDVINEVKSFLSKSFDMKDLGEADVILNIKLIKADGGITLSQSHYVEKVLKRFGFSECKPSPTPYDPSVTLRKNKRIGLDQLRYSQIVGSLMYLAGATRPDISFAVSKLSRFMSNPGTDHWHALERVMRYLQGTMSYGIHYSGQHAVLEGYSDSNWISDADELYATSGYVFTIGGGAVSWRSCKQTILTRSTMEAELAALDTATVEAEWLRELLMDLPVVEKPIPAILMNCDNQTVIAKVTSSKDNGKSSRHVKRRLKSVRKLRNSGVISVTYIS

SEQ ID NO: 223 - protein, 492 aa, Zea mays
FIVYLVEDTPTTISEAYSSPDADLWKEAVRSEMESIMSNGTWEVVDRPYGCQPIGCKWIFKKKLRPDGTIERYKARLVAKGYTQKEGEDFFDTYSPVARLTTIRTLIAVAASYGLIIHQMDVKTAFLNGELDEEIYMDQPEGFIADGQENKVCRLIKSLYGLKQAPKQWHEKFDNTLTAAGFVVNESDTCVYYRYGGGESVMLCLYVDDILIFGSNLNVIEEVKNLLSSNFEMKDLGEADVILNIKLVRKADGGVTLLQSHYVEKVLSRFGFSDCDPAPTPYDPSVLLRKNRRIARDQLTYSQIIGSLMYLASATRPDISYAVSKLSRFVSKPGDDHWCALERVLRYLKGTMTYGIHYTGNPKVLEGYCDANWISDADELYATSGYVFLFGGGAVSWKSCKQTILTKSTMEAELAALDTAGAEAEWLRDFLLDLPVVEKPIPAISMNCDNQTVITKVNSSRNNMKSTRHVKRRLKSVRKLKNSGVITVDYVH

SEQ ID NO: 224 - protein, 400 aa, Vitis vinifera
MASLCRLYQSQQCMSKRQFSIATNRSDCGFHLRARNALFLGCLLRISSNPMSPDDEENTAFITPHGLYCYKVMPFGLKNAGATYQRLMTKIFKPLIGHTVECWQFLGFMVSQRGIEVSPDQVKAVMETPPPRNKKELQGFTGKLVALGRFIARFTDELRPFFLAIRKAGAHGWTDNCQNTFEKIKHCLTQPTHLKQPHSKRKIVYVSGGIRMGNQRRSIPLPLTQGAETYLLRQQALLDTQPTPRIKRTKWWTLRVDGASRSSGSGVGLLLQSPTGEHLEQAIRLGSPASNNEAEYKAILSGLDLALALSVSKLRIYSDSQLVVKHVQEEYEAKDARMARYLAKLPPSHQEAILLPIHVQTSPSVTETSTCNTIEGNPSKRPGMDGQYCKISPDRHSNPG

SEQ ID NO: 225 - protein, 449 aa, Zizania palustris
SKVHNATAKDHPIDQVLGDISKGVQTRSRVASICEHYSFVSSIEPKHVDEALNDPDWVNAMHEELNNFERNKVWTLVERPKEHNVIGTKWVFRNKQDENGLVVRNKARLVAQGFTQVEGLDFGETFAPVARLEAIRILLAFASCFDIKLYQMDVKSAFLNGEIAELVFVEQPPGFENPKNPNHVYKLSKALYGLKQAPRAWYERLRDFLLSKGFKIGKVDTTLFTKIINDDFFVCQIYVDDIIFGSTNEELCKVFGDMMSREFEMSMIGELSFFLGLQVKQLKNGTFVSQTKYIHDLLKRFGLMEAKPIKTPMATNGHLDLNEGGKPVDQKLYRSMIGSLLYLTASRPDIMFSVCMCARFQAAPKDCHLMAVKRILRYLKHSIHIGLWYPKGAKFKLIGYSDSDYAGCKVDRKSTSGGCQFLGRSLVSWASKKQNSVALSTTEAECLRG

SEQ ID NO: 226 - protein, 490 aa, Banana streak GF virus
GSINEEFISPSEIDRLKRLGFIGEEPLRHWKRNQIKCKLEIKNPDLIIEDRPLKHVTPAMKETMTKHVQRLLDIKVIRPSTSKHRTTAIMVNSGTEIDPITGAEKKGKERLVFNYKRLNDNTEKDQYSLPGINTIIARISHSKIYSKFDLKSGFHQVAMEEESIPWTAFWAINGLYEWLVMPFGLKNAPAIFQRKMDNCFRGTEKFIAVYIDDILIFSDSKEAHRTHLRQFITICEENGLVLSPTKMKIGVQQVDFLGATIGDSKVRLQPHIVKKVLETKEESLSETKALRRWLGILNYARAYIPDLGKILGPLYSKTSGKGERKLNHQDMKIIHQIKEKVKNLPELEVPPPESIILIETDGCMDGWGGICKWKLNKGEPRSAEKICAYASGRFNPIKGAIDAEIQAVIYSLEKFKIYYLDKRELILRTDSKAIVRFYEKCSEHKPSRVRWMTLTDYISGCGVKVYFEHIDGKDNTLADELSRLVQAILI

SEQ ID NO: 227 - protein, 488 aa, Kalanchoe top-spotting virus
GVISEDFLDKRLIEEMKRLGFIGDEPLKHWRQNKVTCKLEIKNPDLIIEDKPLKHVTPKMKEVMARHVTALLQSKVIRPSTSKHRTTAIIVESGTEVDPITGKEKRGKERLVFNYKRLNDNTEKDQYSLPGINTIIKRIGTSKVYSKFDLKSGFHQVAMAEESIPWTAFWAIDGLYEWLVMPFGLKNAPAIFQRKMDECFRGMEEFIAVYVDDILIFSNSVQDHKRHLQRFFEVCTKEGLVLSPTKMKIGVREVDFLGATIGNSKIKLQPHIITKIIDMRDEEIKETRGLRKWLGILNYARSYIPRLGQTLGPLYSKVSPNGEKRMNSQDWAIVKKIKQQVQNLPDLELPPQEAIMVIEADGCMEGWGGICKWKIFGPRTSEKVCAYASGKFNPIKSTIDAEIQAVINSLDKFKIYYLDKKELVIRTDSQAIVTFYKRMADHKPSRVRWLAFTDYITGTGLDIKFEHIDGKENILADTLSRLVNFLCF

SEQ ID NO: 228 - protein, 490 aa, Banana streak VN virus
GGEINSDLISPSEIRKLKDLGYIGEEPLKHWAKNQVKCRIEIKNPDLIIEDRPLKHVTPAMKESMKKHVDKLLELKVIRPSTSKHRTTAIIVQSGTEIDPLTGKEKRGKERLVFNYKRLNDNTEKDQYSLPGINTIISRIGKSKIYSKFDLKSGFHQVAMDPESIPWTAFWAIDGLYEWLVMPFGLKNAPAIFQRKMDNCFRGTEEFIAVYIDDILIFSDNISDHRKHLSKFLEICKANGLVLSPTKMKIGAKEIDFLGATIGNSKIKLQPHIIKKIIETKDEELKETKGLRKWLGVLNYARAYIPNLGKTLGPLYSKTSINGEKKMNSQDWKVVQLIKNQVQNLPDLDIPPAEATMVLETDGCMEGWGGVCKWKLHPSDTRLAEKVCAYASGRYHPIKSTIDAEVHAVINSLEKFKIYYLDKKELIIRTDSQAIVAFYKKQADHKPSRTRWLMLIDYITGLGINVKFEHIDGKENVLADTLSRLVQVLI

SEQ ID NO: 229 - protein, 490 aa, Banana streak MY virus
TEGYINKEIMDSKLFKELKDQGYIGEEPLKHWQKNMVKCKLELKNPDITIQDKPLKHVTAKMRETMRAHIDKLLQLKVIRPSSSRHRTTAMIVESGTEVDPKTGQEKRGKERLVFNFKRLNDNTEKDQYSLPGINTIISRIGNAKVYSKFDLKSGFHQVAMDPESIPWTAFLANNELYEWLVMPFGLKNAPAIFQRKMDTCFKGTEAFIAVYIDDILVFSETEQLHRDHLRKFLEISKANGLILSPTKMKIGVKTIDFLGASIGNSKIKLQPHIIKKIADFDDHRLKETKGLRAWLGILNYARNYIPNLGKTLGPLYSKISPNGEKRMNAQDWALVAQVKRQVQNLPELELPPEKCKMVIETDGCMEGWGGVCKWTTVGKAQEKVCAYASGKFTPIKSTIDAEVQAVINSLDKFKIYYLDKKELLIRTDCEAIVRFYKSTAQNKPSRVRWLMLTDFISGTGLEIKFEHINGCENILADSLSRLVQTLLQG

SEQ ID NO: 230 - protein, 500 aa, Cycad leaf necrosis virus
AFFNKKFMEQNRALMERLKKIGIIGEDPLKFWERNKVKCKLDIINPNLTIEDKPLKHVTPAMKEQMRKHIDKLLELKVIRPSKSRHRTTAMIVQSGTEMVLQKDKNGKEKMVEKRGKERLVFNYKRLNDNTEKDQYSLPGINTIIQRIGRSKIYSKFDLKSGFHQVAMDPASIEWTAFWAIDGLYEWLVMPFGLKNAPATFQRKMDMCFAGTEHFIAVYIDDILVFSETEEDHVKHLHQMLHICEKEGLVLSPTKMKIGATSIDFLGATIGRSKIRLQPHIIKKITEAKEEELQTTKGLRAWLGILNYARSYIPNLGKTLGPLYSKVSPTGEKRMNHQDWALVKKVKDSVQNLPDMELPPKQCCIVIETDGCMDGWGGVCKWKLTRHDSKTTEKTCAYASGKFSPVKSTIDAEIQAVICSLDKFKIFYLDKQEVVIRTDCQAIISFFDKTSQNKPSRVRWLTFTDFITGIGIPVRFEHISGKDNLLADTLSRLVLCMVQG

SEQ ID NO: 231 - protein, 490 aa, Dracaena mottle virus
TDAIGVGLRAQKIVQRLLQQNISDDPLKFWAKNKVTCQLEIINPDLTIQDKPLKHVTPLMEQQFKRHVEALLQLKVIRPSKSRHRTMAMIGNSGTSVDPTTGKEVKGKERMVFNYRSLNDNTHKDQYSLPGINTIIQKIGRATVYSKFDLKSGFHQVAMSPESIEWTAFIVLGGLYEWLVMPFGLKNAPAVFQRKMDHCFAGTEKFIAVYIDDILIFSANDEEHVEHLKVFCAIVEKHGLILSSNKMQLGKREIDFLGATLGNRKIKLQAHIIKKIAAFPEAQLAEKKGLRSWLGILNYARSYIPRLGILLGPLYQKTSPHGDKRMKPHDWELVAQIKQMVQSLPDLEVPPKDSFIVLETDGCMEGWGGICKWKQAKKDPRGKEKVAAYASGRFPVPKSTIDAEIYACTETLSALKIHYLDRKEIILRTDCQAIISFYNKSSVNKPSRVRWLAFTDFITGLGIDVQFEHIKGEQNVLADTLSRLTFVLLQ

SEQ ID NO: 232 - protein, 491 aa, Bougainvillea spectabilis chlorotic vein-banding virus
TTSDGFKSRFTSTIEDLKAQGVIGDAPLQLWERNQVKCKLEVINPDITISDKPLKHVSIGLKQQFQNQLDPLLKMGLIRPSTSRHRTMAMIINSGTTVDPVTGEEKRGKERMVFNYKTLNDNTYRDPYSLPGINTIIQKVGRSKIYSKFDLKSGFHQVAMDPESIPWTAFLTPQGLFEWLVMPFGLKNAPAIFQRKMDNCFSRYSDFIAVYIDDILVFSESERDHEKHLRVMLQVCQENGLVLSPTKMKVAVKTIEFLGAILGNQCVQLQPHIIQKIVDFDEEHLQTKQGIRSWLGILNYARTYIPNIGTLLAPFYEKTSPHGDKRLKPSDRELVKKIKEMVQHLPPLELPPPDAYIILETDGSMEGWGGICKWKHKKNDPRSSERVCDYASGKFPVVKSSIDAEIHAAMFTLEKLKIYYLDKEEIILRTDCQAIISYYNKSNSNKPSRARWIAFTDYITNTGTNIKFEHIEGKLNVLADALSRITCYLCT

SEQ ID NO: 233 - protein, 493 aa, Sugarcane bacilliform IM virus
FIDKPFMSKNKQLIEEMKEQGYMGEDTLKHWEKNKVKCKIELINPDLIIKDKPITMLTIQTKEAMRKHVDALLARGVIRKSNSPHRTNAFIVESGTSVDPVTKKEIRGKPRLVFNYKRLNDNTWPDQYSLPGINALLKNVARAKIFSKFDLKSGFHQVAMDPESIPLTAFTAYNELYEWLVMPFGLKNAPAVFQRKMDDCFRGTERFIAVYIDDILVFSETEEKHAEHLWKMLQICKKNGLILSPSKYKIGVKRVDFLGSTIGDNQLAVQEHIVSKIADFDEERLKTKEGLKSWLATLNYARNHIKDMGKLLGPLYPKTSEKGAKGLNSEDWKLISRIKTMVRSLPSLTIPPEDAYIIIETDACATGWGAVCKWKKSKADPRSSELICRYASGKFDKPKGTCDAEIYGVMNGLEKMRLFYLDKREITVRTDSAAIERFYNKSVEHKPSEIRWIRFMDYITGAGPTIVIEHIKGKHNGLADILSRLKAKLAEAP

SEQ ID NO: 234 - protein, 443 aa, Maize yellow mosaic virus
MAEKVSGFGWPQFGPAAELKSLRLQAQRWLSRAESAKIPSTEDRERVIRKTVEAYKTCQTQCPKTSQSNLLVWENFLEDFKQAVFSLEPDAGVGVPFVGYDKRTHRGWIEDPTLLPVLARMTFDRLHKMSTVKFEHLTAEELVQAGLCDPIRLFVKGEPHKQAKLDEGRYRLIMSVSLLDQLVARVLFQNQNKREIALWRAIPSKPGFGLSTDDQSREFVQNLARQCGVSSDHLLQEWQLHTVPTDCSGFDWSVAEWMLQDDMEVRNRLTRNNTDLTRRLRACWLKCISNSVLCLSDGTLLAQRVAGVQKSGSYNTSSSNSRIRVMAAYHCGATWAMAMGDDALESVDTCLDVYKDLGFKVEVSKQLEFCSHVFEKEHLARPVNQNKMIYKLVYGYNPANGSSEVLQRYLDACMSVLHELRHDPETVELLYKWLVSPVQQQKV

SEQ ID NO: 235 - protein, 490 aa, Dioscorea bacilliform virus
EPNNYFSNKLSQVFQELKAAGYIGDDPLKFWSKNQVVCELNIINPDLTIQDKPLKHVTPAMEETFRKHIDALLKLKVIRASKSRHRTTAFIVYSGTTVDPVTGKENKGKERMVFNYKRLNDNTEKDQYSLPGINTILKRVGQSKIYSKFDLKSGFHQVAMAPQSVEWTAFLAPGGLYEWLVMPFGLKNAPAVFQRKMDNVFRGTEEFIAVYIDDILVFSETEEEHLKHLRILLQICQQHGLVLSPTKMKIGTKTIEFLGAVIGNRKIKLQEHIIKKIADFSDDELKTTKGLRSWLGILNYARAYMPNMGRILGPLYSKVSPNGEKRLNAEDWRLIREVRTTIRALPDLELPPADSFIVIEADGCMEGWGGVCKWKKLKKDFRRNERVCAYASGKFDPPKSTIDAELFAVMNSMDKFKIHYLDRKELLIRSDCQALISFYNKSSENKPSRVRWIAFNDFVTGLGIDVTFEHIDGKDNQLADSLSRLVTSLV

SEQ ID NO: 236 - protein, 491 aa, Citrus yellow mosaic virus
RPFVHFQQKFAGLIQELKAQGYIGEEPMKYWAKNRVVCHLDIKNPDMVIEDRPLKHVTPQMEESFRRHVEALLKIGAIRPSKSRHRTTAIIVNSGTSIDPITGKEVKGKERMVFNYKRLNDLTNKDQYSLPGIQTILQRLKGSTIFSKFDLKSGFQQVAMHPDSVEWTAFWVPSGLYEWLVMPFGLKNAPAVFQRKMDHCFKGTEAFIAVYIDDILVFSKTEKEHEEHLQIMLSICQRNGLILSPTKMKIAQAEIEFLGAIIHNGLIKLQPHIVQKLLTFTNKQLEEVKGLRSWLGLLNYARSYIPHMGRLLSPLYAKVSPTGERRVNRQDWALIDKIRAQVQNLPALELPPADCFIIIETDGCMDGWGGVCKWKIAQYDPRSSERVCAYASGKFNPPKSTIDAEIHAVMNSLNSFKIYYLDKPSLCLRTDCQAIISFFNKSNVNKPSRVRWIAFTDFLTGLGIPVNIEHIDGKNNHLADALSRLVTGFVF

SEQ ID NO: 237 - protein, 490 aa, Banana streak OL virus
RGEISEEFISPDIIGKMKKLGYIGEEPLKHWEKNQVKCRIEVKNPDMIIEDRPLKHVTPTMKETMAKHVQKLLELKVIRPSSSKHRTTAMIVESGTEVDPMTGKERRGKERLVFNYKRLNDNTEKDQYSLPGINTIIKRIGNAKIYSKFDLKSGFHQVAMDPESIPWTAFWAIDGLYEWLVMPFGLKNAPAIFQRKMDNCFRGTEDFIAVYIDDILVFSETIHQHKEHLKKFMTICEKNGLVLSPTKMKIGTRQIDFLGATIGNSKIKLQPHIIKKIIEMKDEELKEVKGLRKWLGILNYARSYIPKLGKILGPLYAKTSPNGERRMNTQDWKIVKEVKEVVANLPELELPPEKAIMIIETDGCMEGWGGVCKWKTDSLQPRWSEKICAYASGKFTPIKSTIDAEIQAVINSLDKFKIYYLDKKELIIRTDSQAIVSFYKKSSDHKPSRVRWLAFTDYITGTGLEIKFEHIDGKDNVLADTLSRLVKIIL

SEQ ID NO: 238 - protein, 490 aa, Taro bacilliform virus
TTSQSFKERFSPLMNELKAAGYIGEDPLKHWSKNKVTCKLDLKNTEITIQDKPLRHITPALEQSYGRHVNALLMLKVIQPSKSRHRTMAFLVNSGTTVTADGKEIKGKERMVFNYKALNDNTYKDQYSLPNIQLILKKVINSTIYSKFDLKSGFHQVAMDPDSVEWTAFLVPQGLYEWLAMPFGLKNAPAVFQRKMDAVFKGCEKFLAVYIDDILVFSNNEEDHAKHLVIMLQRCKEHGLVLSPTKMNIAVREVNFLGATIGSRKVKLQENIIKKILDFDTEKLQSKKGLRSFLGILNYARNHIPNLGKIAGPLYSKTSIYGDIRFSASDWKLINEIKAIVEKLPPLDYPPEQAYIIIESDGCMEGWGAICKWKLAEYDPKSSEQICAYASGKFSPIKSTIDAEITAAMEGLEAFKIHYLDKQKITLRTDCQAIISFCNKTSVNKPSRVRWLKFIDYITNTGIDVKFEHIDAKNNVLADTLSRLVNTLQD

SEQ ID NO: 239 - protein, 491 aa, Cacao swollen shoot virus
AQQQKLDPKLQQLMVQLQDQGFIGENPMQHWAKNKILCRLDIKNPDLIIEDKPIKHLTPAMEKQFQKHIKALLDIGVIRPSKSKHRTTAFIVESGTVIDPVTKKTIHGKERLVFNYKRLNDNTEKDQYSLPGIQTILKRVGNKKVFSKFDLKSGFHQVAMAEESIPWTAFWVPQGLYEWLVMPFGLKNAPAVFQRKMDQCFKGTEEFIAVYIDDILVFSENMAEHTKHIGIMLKICQENGLVLSPSKICLAQREIEFLGTVISQGQMKLQAHVIKKIVNKANIELETTKGLRSFLGLLNYARIYIPNLGRKLSPLYAKTSPTGEKRFNRQDWHLIKEIKDMVQKLPNLAIPPARCYIIIESDGCMEGWGAVCKWKLAKEDSRTTEKICAYASGKFGVVKSTIDAEIYALIKALESFKIFYLDKKHLVVRTDCQAIVTFYNKTSTHKPSRIRWITFSDYITGLGVPVTIEHIDGKENQLADTLSRLVYTTWN

SEQ ID NO: 240 - protein, 477 aa, Tobacco vein clearing virus
LEIIIFTIDKVKIIQKKLEKLYNDNPLQGWEKHKTKVKIELIEENSIITQKPLKYNFNDLTEFKIHIKDLLDNKYIQESNSKHTSPAFIVNKHSEQKRGKSRMVIDYRNLNAKTKTYNYPIPNKILKIRQIQGYNYFSKFDCKSGFYHLKLEDESKKLTAFTVPQGFYEWNVLPFGYKNAPGRYQHFMDNYFNQLENCIVYIDDILLYSRTQDEHIKLLEKFAHIIENSGISLSKTKAEIMKNQIEFLGIQIDKNGIKMQTHIVQKIINLDENIDTKKKLQSFLGIVNQVREYIPKLAENLKPLQKKLKKDVEYSFDEKDKEQIKKIKILCKKLPKLYFPDENKKFTYIVETDSSNYSYGGVLKYRYNKEKIEHHCRYYSGSYTEPQEKWEINRKELFALYKCLLAFEPYIVYTRFIVRTDNTQVKWWITRKVQDSVTTKEIRRLVLNILNFTFTIEIINTNKNVVADYLSRQSYPN

SEQ ID NO: 241 - protein, 479 aa, Cauliflower mosaic virus
KLFITQQRMQKIEELLEKVCSENPLDPNKTKQWMKASIKLSDPSKAIKVKPMKYSPMDREEFDKQIKELLDLKVIKPSKSPHMAPAFLVNNEAEKRRGKKRMVVNYKAMNKATVGDAYNLPNKDELLTLIRGKKIFSSFDCKSGFWQVLLDQESRPLTAFTCPQGHYEWNVVPFGLKQAPSIFQRHMDEAFRVFRKFCCVYVDDILVFSNNEEDHLLHVAMILQKCNQHGIILSKKKAQLFKKKINFLGLEIDEGTHKPQGHILEHINKFPDTLEDKKQLQRFLGILTYASDYIPKLAQIRKPLQAKLKENVPWRWTKEDTLYMQKVKKNLQGFPPLHHPLPEEKLIIETDASDDYWGGMLKAIKINEGTNTELICRYASGSFKAAEKNYHSNDKETLAVINTIKKFSIYLTPVHFLIRTDNTHFKSFVNLNYKGDSKLGRNIRWQAWLSHYSFDVEHIKGTDNHFADFLSREFNKVNS

SEQ ID NO: 242 - protein, 472 aa, Petunia vein clearing virus
SNELQQLEDVIKNQLCADSHVDFLSKCSHPLWLNQDFFIQLPFKKNENINPTKASHSGMNPEHLQLAIKECDELQQFDLIEPSDSQWACEAFYVNKRSEQVRGKLRLVINYQPLNHFLQDDKFPIPNKLTLFSHLSKAKLFSKFDLKSGFWQLGIHPNERPKTGFCIPDRHFQWKVMPFGLKTAPSLFQKAMIKIFQPILFSALVYIDDILLFSETLEDHIKLLNQFISLVKKFGVMLSAKKMILAQNKIQFLGMDFADGTFSPAGHISLELQKFPDTNLSVKQIQQFLGIVNYIRDFIPEVTEHISPLSDMLKKKPPAWGKCQDNAVKQLKQLAQQVKSLHIPSEGKKILQTDASDQYWSAVLLEEHNGKRKICGFASGKFKVSEQHYHSTFKEILAVKNGIKKFNFFLIHTNFLVEMDMRAFPKMIRLNPKIVPNSQLLRWAQWFSPYQFEVKHLKGKDNILADFLSRPH

SEQ ID NO: 243 - protein, 516 aa, Eupatorium vein clearing virus
PPTPENISRLTDKIVSFSGGESSEDTTKTNFENDFLKTENIFEIQSTSEIEELLELACSENPLDPEKSKGLLTASIKLIDPNKIIRVKPIPYPPNIRQEFDIQIKELLAMNLIVPSKSPHMSPAFMVNKGAEQRRGKMRMVVNYKALNDATIGDAHNIPNRDSLMALISGKRIFSSFDCKSGFWQVLLDKPSQELTAFTCPQGHYQWLVMPFGLKQAPAIFQRHMQIALNEHSAYSCVYIDDILVFSENEKDHEIHVSKVLNRCINLGIILSKKKSQLFKETIDFLGISIDKGTHSPKPHILENIHNFPERFKDVNQCRKFLGIITYAMRYIPELSRKRMFLQDKLKKNVPWTWTSEDTRLLQKLKLSLKEFPKLHIPQPGQQLILETDASQKYWGGILKAEVIHSNNEITEEICCYASGTFKQAELNYHSNEKEILAVIRSIQSFPVYLTPVEFIVRTDNKTMEHFLTSKFELGTKSGRLVRWQMWFKHYNFKVEHIKGTSNFLADYLSREYNEI

SEQ ID NO: 244 - protein, 480 aa, Lamium leaf distortion virus
KKLFEEDLKKKSIIEKLLDQVCSENPLDPLKTKKWMKASIKLIDPKTVVKVKPMRYNPQDVEEFAKQIKELLELKIIIPSKSPHQSPAFLVENEAERRRGKKRMVVNYKAINTATIGDAHNLPNKDELLTLIRGKSIFSSFDCKSGFWQVLLDEDSQLLTAFTCPQGHYQWIVVPFGLKQAPSIFQRHMNNAFRDFASYCCVYVDDILVFSNNIKDHYAHVAQVLRKCAELGIILSKKKAQLFKCRINFLGLDIDEGTHRPQNHILEHIHKFPNKIEDKKQLQRFLGILTYASDYIPQLASMRAPLQEKLKEDVPWNWKHSDTEYVEEIKKSLTDFPKLHHPATDEKLIIECDASGKYWGGILKAIHQSEERICRYTSGSFKKAELNYHSNEKEILAVIRVIAKFTIYLTPLEFLIRTDNKNFTFFMNTNVKGDYKQGRLVRWQQWLSRYSFKVEHITGVKNIFADFLTREFQSKNSIEL

SEQ ID NO: 245 - protein, 477 aa, Carnation etched ring virus
ELCYEIQISKFSAIEEMLERVSSENPIDPEKSKQWMTATIELIDPKTIVEVKPMSYSPSDREEFDKQIKEPLDLKVIKPSKSPHMSPAFLVENEAERRRGKKRMVVNYKAMNKATKGDAHNLPNKDELLALVRGKKIYSSFDCKSGFWQVLLDKESQLLTAFTCPQGHYQWNVVPFGLKQAPSIFQRHMQTAFNQHSKYCCVYVDDILVFSNTEEEHYIHVLNILRRCEKLGIILSKKKAQLFKEKINFLGLEIDQGTHCPQNHILEHIHKFPDRIEDKKQLQRSLGILTYASDYIPKLASIRKPLQSKLKEDSTWTWNDTDSQYMAKIKKNLKSFPKLYHPEPNDKLVIETDASEEFWGGILKAIHNSHEYICRYASGSFKAAERNYHSNEKELLAVFRVIYKFSIYLTPCRFLIRSDNKNFTHFVNINLKGDRKQGRLVRWQMWLSQYDFDVEHIAGTKNVFADFLQENTLTNYV

SEQ ID NO: 246 - protein, 677 aa, Synthetic construct
TLNIEDEYRLHETSKEPDVSLGSTWLSDFPQAWAETGGMGLAVRQAPLIILLKATSTPVSIKQYPMRQKARLGIKPHIQRLLDQGILVPCQSPWNTPLLPVKKPGTNDYRPVQDLREVNKRVEDIHPTVPNPYNLLSGLPPSHQWYTVLDLKDAFFCLRLHPTSQPLFAFEWRDPEMGISGQLTWTRLPQGFKNSPALFDEALRRDLADFRIQHPDLILLQYVDDLLLAATSELDCQQGTRALLQTLGDLGYRASAKKAQICQKQVKYLGYLLKEGQRWLTEARKETVMGQPTPKTPRQLRKFLGTAGNCRLFIPGFAEMAAPLYPLTKPGTLFNWGPDQQKAYQEIKQALLTAPALGLPDLTKPFELFVDEKQGYAKGVLTQKLGPWRRPVAYLSKKLDPVAAGWPPCLRMVAAIAVLTKDAGKLTMGQPLVIGAPHAVEALVKQPPDRWLSKARMTHYQALLLDTDRVQFGPVVALNPATLLPLPEEGLQHNCLDILAEAHGTRPDLTDQPLPDADHTWYTGGSSLLQEGQRKAGAAVTTETEVIWAKALPAGTSAQRAELIALTQALRMAEGKKLNVYTNSRYAFATAHIQGEIYRRRGLLTSEGKEIKNKDEILALLKALFLPKRLSIIHCPGHQKGHSAEARGNRMANQAARKAAITENPDTSTLPIENSSP

SEQ ID NO: 247 - protein, 677 aa, Synthetic construct
TVSLQDEHRLFDIPVTTSLPDVWLQDFPQAWAETGGLGRAKCQAPIIIDLKPTAVPVSIKQYPMSLEAHMGIRQHIIKFLELGVLRPCRSPWNTPLLPVKKPGTQDYRPVQDLREINKRTVDIHPTVPNPYNLLSTLKPDYSWYTVLDLKDAFFCLPLAPQSQELFAFEWKDPERGISGQLTWTRLPQGFKNSPTLFDEALHRDLTDFRTQHPEVTLLQYVDDLLLAAPTKKACTQGTRHLLQELGEKGYRASAKKAQICQTKVTYLGYILSEGKRWLTPGRIETVARIPPPRNPREVREFLGTAGFCRLWIPGFAELAAPLYALTKESTPFTWQTEHQLAFEALKKALLSAPALGLPDTSKPFTLFLDERQGIAKGVLTQKLGPWKRPVAYLSKKLDPVAAGWPPCLRIMAATAMLVKDSAKLTLGQPLTVITPHTLEAIVRQPPDRWITNARLTHYQALLLDTDRVQFGPPVTLNPATLLPVPENQPSPHDCRQVLAETHGTREDLKDQELPDADHTWYTDGSSYLDSGTRRAGAAVVDGHNTIWAQSLPPGTSAQKAELIALTKALELSKGKKANIYTDSRYAFATAHTHGSIYERRGLLTSEGKEIKNKAEIIALLKALFLPQEVAIIHCPGHQKGQDPVAVGNRQADRVARQAAMAEVLTLATEPDNTSHIT

SEQ ID NO: 248 - protein, 673 aa, Synthetic construct
LVLNLEEEYRLNEKPVPPSIDPSWLQLFPMVWAEKAGMGLANQVPPVVVELKSDASPVAVRQYPMSKEAREGIRPHIQRFLDLGILVPCQSPWNTPLLPVKKPGTNDYRPVQDLREVNKRVQDIHPTVPNPYNLLSSLPPSHTWYSVLDLKDAFFCLKLHPNSQPLFAFEWRDPEKGNTGQLTWTRLPQGFKNSPTLFDEALHRDLASFRALNPQVVMLQYVDDLLVAAPTYRDCKEGTRRLLQELSKLGYRVSAKKAQLCREEVTYLGYLLKGGKRWLTPARKATVMKIPTPTTPRQVREFLGTAGFCRLWIPGFASLAAPLYPLTREKVPFTWTEAHQEAFGRIKEALLSAPALALPDLTKPFALYVDEKEGVARGVLTQTLGPWRRPVAYLSKKLDPVASGWPTCLKAIAAVALLLKDADKLTLGQNVLVIAPHNLESIVRQPPDRWMTNARMTHYQSLLLNERVSFAPPAILNPATLLPVESDDTPIHICSEILAEETGTRPDLRDQPLPGVPAWYTDGSSFIMDGRRQAGAAIVDNKRTVWASNLPEGTSAQKAELIALTQALRLAEGKSINIYTDSRYAFATAHVHGAIYKQRGLLTSAGKDIKNKEEILALLEAIHLPKRVAIIHCPGHQRGTDPVATGNRKADEAAKQAAQSTRILTETTKNQEH

SEQ ID NO: 249 - protein, 673 aa, Synthetic construct
TAPLEEEYRLFLEAPIQNVTLLEQWKREIPKVWAEINPPGLASTQAPIHVQLLSTALPVRVRQYPITLEAKRSLRETIRKFRAAGILRPVHSPWNTPLLPVRKSGTSEYRMVQDLREVNKRVETIHPTVPNPYTLLSLLPPDRIWYSVLDLKDAFFCIPLAPESQLIFAFEWADAEEGESGQLTWTRLPQGFKNSPTLFDEALNRDLQGFRLDHPSVSLLQYVDDLLIAADTQAACLSATRDLLMTLAELGYRVSGKKAQLCQEEVTYLGFKIHKGSRSLSNSRTQAILQIPVPKTKRQVREFLGTIGYCRLWIPGFAELAQPLYAATRGGNDPLVWGEKEEEAFQSLKLALTQPPALALPSLDKPFQLFVEETSGAAKGVLTQALGPWKRPVAYLSKRLDPVAAGWPRCLRAIAAAALLTREASKLTFGQDIEITSSHNLESLLRSPPDKWLTNARITQYQVLLLDPPRVRFKQTAALNPATLLPETDDTLPIHHCLDTLDSLTSTRPDLTDQPLAQAEATLFTDGSSYIRDGKRYAGAAVVTLDSVIWAEPLPIGTSAQKAELIALTKALEWSKDKSVNIYTDSRYAFATLHVHGMIYRERGLLTAGGKAIKNAPEILALLTAVWLPKRVAVMHCKGHQKDDAPTSTGNRRADEVAREVAIRPLSTQATIS

SEQ ID NO: 250 - protein, 671 aa, Synthetic construct
TLNIEDEYRLHETSKGPDVPLGSTWLSDFPQAWAETGGMGLAVRQAPLIIPLRAASTPVSIKQYPMSREARLGIKPHIQRLLDQGILVPCQSPWNTPLLPVKKPGTNDYRPVQDLREVNKRVEDIHPTVPNPYNLLSGLPPSHQWYTVLDLKDAFFCLRLHPTSQSLFAFEWRDPEMGISGQLTWTRLPQGFKNSPTLFDEALHRDLADFRIQHPDLILLQYVDDLLLAATSELDCQQGTRALLQTLGDLGYRASAKKAQICQKQVKYLGYLLKEGQRWLTEARKETVMGQPTPKTPRQLREFLGTAGFCRLWIPGFAEMAAPLYPLTKTGTLFKWGPDQQKAYQEIKQALLTAPALGLPDLTKPFELFVDEKQGYAKGVLTQKLGPWRRPVAYLSKKLDPVAAGWPPCLRMVAAIAVLTKDAGKLTMGQPLVILAPHAVEALVKQPPDRWLSNARMTHYQALLLDTDRVQFGPIVTLNPATLLPLPEEGLQHDCLDILAEAHGTRPDLTDQPLPDADHTWYTDGSSFLQEGQRKAGAAVTTETEVIWAKALPAGTSAQRAELIALTQALKMAEGKKLNVYTDSRYAFATAHIHGEIYRRRGLLTSEGKEIKNKEEILALLKALFLPKRLSIIHCPGHQKGNRAEARGNRMADQAAREVATRETPETSTLL

SEQ ID NO: 251 - protein, 560 aa, Synthetic construct
PISPIETVPVKLKPGMDGPKVKQWPLTEEKIKALVEICTEMEKEGKISKIGPENPYNTPVFAIKKKDSTKWRKLVDFRELNKRTQDFWEVQLGIPHPAGLKKKKSVTVLDVGDAYFSVPLDEDFRKYTAFTIPSINNETPGIRYQYNVLPQGWKGSPAIFQSSMTKILEPFRKQNPDIVIYQYMDDLYVGSDLEIGQHRTKIEELRQHLLRWGLTTPDKKHQKEPPFLWMGYELHPDKWTVQPIVLPEKDSWTVNDIQKLVGKLNWASQIYPGIKVRQLCKLLRGTKALTEVIPLTEEAELELAENREILKEPVHGVYYDPSKDLIAEIQKQGQGQWTYQIYQEPFKNLKTGKYARMRGAHTNDVKQLTEAVQKITTESIVIWGKTPKFKLPIQKETWETWWTEYWQATWIPEWEFVNTPPLVKLWYQLEKEPIVGAETFYVDGAANRETKLGKAGYVTNRGRQKVVTLTDTTNQKTELQAIYLALQDSGLEVNIVTDSQYALGIIQAQPDQSESELVNQIIEQLIKKEKVYLAWVPAHKGIGGNEQVDKLVSAGIRKVL

SEQ ID NO: 252 - DNA, 2031 bp, Synthetic construct
  source 1..2031: mol_type = other DNA
accctgaatattgaggatgaatacagactgcatgagacctctaaggaacccgatgtgagcctgggaagcacttggctgagcgacttccctcaggcatgggctgagactggaggcatgggcctggccgtgaggcaggcacctctgattatcctgctgaaggccacatccaccccagtgtcaattaagcagtaccccatgaggcagaaggcaagactgggaattaagccacacatccagagactgctggatcagggcatcctggtgccttgccagtccccttggaacacacccctgctgcctgtgaagaagcctggcaccaatgattataggccagtgcaggacctgagggaggtgaacaagagagtggaagacattcatcctaccgtgcctaacccatacaatctgctgtctggtctgcctccaagccaccagtggtatactgtgctggatctgaaggacgcattcttttgtctgaggctgcatcccacatcacagcctctgttcgcttttgagtggagagatcccgaaatgggaatctccggccagctgacttggacaaggctgccccagggtttcaagaactcacctgccctgtttgatgaggcactgagaagggatctggccgatttcaggattcagcacccagacctgatcctgctgcagtatgtggatgacctgctgctggctgccacctccgaactggattgccagcagggaactagggcactgctgcagacactgggtgacctggggtatagagcctcagcaaagaaggctcagatttgtcagaagcaggtgaagtacctgggttatctgctgaaggaggggcagaggtggctgaccgaggctagaaaggaaactgtgatggggcagcccacacctaagaccccaaggcagctgagaaagttcctgggaactgctggcaattgcaggctgttcattcccggatttgccgagatggcagctccactgtaccccctgaccaagccaggaactctgtttaactggggccccgaccagcagaaggcatatcaggaaatcaagcaggctctgctgactgctcctgccctgggcctgcctgatctgacaaagcccttcgagctgtttgtggacgaaaagcagggttacgctaagggggtgctgacccagaagctgggtccttggagaaggcccgtggcctatctgtctaagaagctggaccctgtggctgcaggatggcccccttgcctgagaatggtggctgccattgctgtgctgacaaaggacgccggaaagctgactatgggacagcctctggttattggggcaccacatgctgtggaagccctggtgaagcagccacccgataggtggctgagcaaggccagaatgacccactaccaggcactgctgctggatactgacagggtgcagttcggccccgtggtggctctgaatcctgccactctgctgccactgcccgaggaaggtctgcagcataactgtctggacatcctggcagaggctcacgggacaagacctgatctgaccgaccagcctctgccagatgccgaccatacttggtatacaggtgggtctagcctgctgcaggaaggacagaggaaggccggcgcagctgtgaccactgagacagaagtgatttgggccaaggcactgccagctggaacatctgcacagagggctgagctgatcgcactgacccaggctctgagaatggccgaaggcaagaagctgaacgtgtacaccaactctaggtatgctttcgccacagcacacattcagggtgaaatctacagaaggagaggtctgctgacaagcgaggggaaggaaattaagaataaggatgaaatcctggcactgctgaaggctctgtttctgcctaagagactgtccattatccactgtccaggacatcagaagggccactcagctgaggccaggggaaacagaatggctaatcaggccgcaaggaaggctgccattaccgagaacccagacaccagcactctgcccatcgaaaattcctcacct

SEQ ID NO: 253 - DNA, 2031 bp, Synthetic construct
  source 1..2031: mol_type = other DNA
accgtgtccctgcaggatgagcacagactgttcgacatccctgtgaccacttcactgccagacgtgtggctgcaggactttcctcaggcttgggctgaaaccggaggcctgggtagggcaaagtgccaggcaccaattatcattgatctgaagcctactgccgtgccagtgtctatcaagcagtaccctatgagcctggaggcacacatgggtattagacagcatatcattaagttcctggaactgggggtgctgagaccctgtaggtctccttggaacacacccctgctgcctgtgaagaagccaggaacccaggattacaggcccgtgcaggacctgagggagatcaataagagaacagtggatattcatcctaccgtgcccaacccttataatctgctgtccaccctgaagccagactactcatggtatactgtgctggatctgaaggacgctttcttttgcctgcctctggctcctcagagccaggagctgttcgctttcgagtggaaggaccctgagagaggtatctctgggcagctgacatggaccaggctgcctcagggattcaagaatagcccaaccctgtttgacgaggccctgcacagggatctgactgacttcagaacacagcatccagaagtgacactgctgcagtatgtggatgacctgctgctggctgcccccaccaagaaggcatgcactcagggcacaagacacctgctgcaggagctgggagaaaagggctatagggcatccgctaagaaggctcagatttgccagaccaaagtgacttacctgggttatattctgtcagaggggaagaggtggctgactcccggaagaatcgaaacagtggctaggattcctccacccagaaaccctagggaggtgagagagttcctgggtacagccgggttttgtagactgtggattcccggctttgctgagctggcagctcctctgtatgccctgaccaaggaatccacacctttcacctggcagactgaacatcagctggcttttgaggccctgaagaaggctctgctgtctgcccctgcactgggactgccagatacaagcaagcccttcaccctgtttctggacgagagacagggaatcgcaaagggcgtgctgactcagaagctgggtccttggaagaggcccgtggcttacctgtctaagaagctggaccctgttgctgcaggatggcctccatgcctgaggattatggctgccaccgcaatgctggtgaaggactctgctaagctgactctgggtcagcccctgacagtgatcacccctcacactctggaggctattgtgaggcagccccctgatagatggatcactaatgccagactgacacattatcaggcactgctgctggatactgacagggtgcagtttgggccacccgtgaccctgaaccctgccactctgctgccagtgcccgaaaatcagccttccccacacgactgtagacaggtgctggccgaaacccacggaaccagagaggatctgaaggaccaggaactgcctgatgcagaccacacttggtacacagatgggtctagctatctggactcaggaacaagaagggcaggcgcagctgtggtggatggacataacactatttgggctcagtccctgcctccaggcacatcagcacagaaggctgagctgatcgctctgactaaggccctggaactgtctaagggaaagaaggccaatatctacacagacagcagatatgctttcgccaccgcacacactcatggctccatctacgagagaaggggactgctgacctcagagggcaaggaaattaagaacaaggcagagatcattgctctgctgaaggccctgtttctgccacaggaagtggctatcattcactgcccaggtcatcagaaaggacaggaccctgtggctgtgggaaacaggcaggcagacagggtggctagacaggccgcaatggccgaggtgctgacactggcaaccgaacccgataatacctctcacattact

SEQ ID NO: 254 - DNA, 2379 bp, Synthetic construct
  source 1..2379: mol_type = other DNA
acactgggagatcagggatctaggggatctgatcctctgcccgaacctagggtgaccctgactgtggaaggcattcctactgagttcctggtggatacaggtgccgagcactctgtgctgaccaagccaatggggaagatgggaagcaagagaaccgtggtggctggcgccactggttccaaggtgtacccttggaccactaagaggctgctgaagattggacagaagcaggtgacacattctttcctggttattcctgaatgtcctgcacccctgctgggaagggatctgctgaccaagctgaaggctcagattcagttttctacagaaggaccccaggtgacctgggaggacagacctgctatgtgcctggtgctgaacctggaggaagagtataggctgcacgagaagcccgtgcctccatctatcgaccctagctggctgcagctgttcccaatggtgtgggcagaaaaggctggtatggggctggcaaatcaggtgccccctgtggtggtggagctgaagtccgatgcttcacccgtggccgtgagacagtaccctatgagcaaggaagctagagaggggattaggccacatatccagaggtttctggacctgggcattctggtgccttgccagtccccctggaacactcctctgctgccagtgaagaagccaggaacaaatgattatagacccgtgcaggacctgagagaagtgaacaagagggtgcaggatattcacccaacagtgcctaacccatacaatctgctgtctagcctgccaccctcccatacctggtattcagtgctggatctgaaggacgcattcttttgtctgaagctgcaccctaacagccagccactgttcgctttcgagtggagagatcctgagaaggggaacactggacagctgacatggaccaggctgcctcagggattcaagaactctccaacactgtttgatgaggccctgcatagagacctggcatcttttagggctctgaatccacaggttgtgatgctgcagtatgtggatgacctgctggtggctgcccctacttatagggattgcaaggaaggcacaagaaggctgctgcaggagctgtctaagctgggttacagagtgagcgccaagaaggcacagctgtgcagggaagaagtgacttacctgggctatctgctgaagggaggcaagagatggctgactcccgctaggaaggccacagtgatgaagattcccacccctacaacccctagacaggtgagggagttcctgggcactgccggtttttgcagactgtggattcctggtttcgcaagcctggcagctcccctgtatcctctgacaagagaaaaggtgcctttcacttggacagaagcccaccaggaggcatttgggaggattaaggaggctctgctgtccgcaccagctctggccctgcccgatctgaccaagccttttgctctgtatgtggatgaaaaagaaggagtggccaggggagtgctgacccagactctgggcccctggagaaggcctgtggcatatctgtctaagaagctggaccctgtggcttcaggttggccaacctgcctgaaggcaatcgccgcagtggctctgctgctgaaggatgccgacaagctgactctgggacagaacgtgctggttattgcaccacacaatctggaatctatcgtgagacagcctccagacaggtggatgaccaatgctagaatgactcattaccagtctctgctgctgaacgagagggtgagcttcgcaccccctgctattctgaatccagccacactgctgcccgtggaatccgatgacacccctattcacatctgttcagagatcctggccgaagagacaggcaccagacctgatctgagagaccagccactgcctggggtgccagcatggtataccgatggatcttctttcattatggatgggagaaggcaggctggagctgccatcgtggataacaagagaaccgtgtgggcctccaatctgccagaagggacttcagcccagaaggcagagctgattgctctgacccaggccctgagactggcagagggaaagtctattaacatctacaccgatagcaggtatgcattcgctactgcccacgtgcatggcgctatctacaagcagagaggcctgctgacttcagccggaaaggacattaagaataaggaagagatcctggctctgctggaggccatccatctgcctaagagggtggccattatccactgtccaggccatcagagaggtacagatcccgtggccaccggcaacaggaaggcagacgaagcagctaagcaggccgcacagtctactaggattctgacagagactacaaagaat

SEQ ID NO: 255 - DNA, 2019 bp, Synthetic construct
  source 1..2019: mol_type = other DNA
accgctcctctggaggaagagtacagactgttcctggaagcacctattcagaacgtgactctgctggagcagtggaagagggaaattcctaaagtgtgggccgagatcaatcctccaggactggcttccacacaggccccaattcacgtgcagctgctgtcaaccgccctgcccgtgagagtgaggcagtaccctatcacactggaggcaaagaggtctctgagggaaaccattagaaagtttagggctgccggaatcctgagacccgtgcacagcccttggaacactccactgctgcccgtgagaaagtccggcacatcagagtataggatggtgcaggatctgagagaggtgaacaagagggtggaaaccattcatcctactgtgccaaatccctacaccctgctgtctctgctgccccctgacagaatctggtatagcgtgctggatctgaaggacgctttcttttgcattcctctggccccagagtcccagctgatcttcgcctttgaatgggcagatgctgaagagggagagtctggccagctgacctggactaggctgccacagggattcaagaacagccccactctgtttgatgaagctctgaatagagacctgcagggcttcaggctggaccacccatctgtgagcctgctgcagtatgtggatgacctgctgattgcagctgatacacaggccgcatgcctgtccgccactagagacctgctgatgacactggcagagctgggttacagggtgtcagggaagaaggcccagctgtgccaggaagaagtgacttatctgggttttaagatccataaggggtccagatcactgtctaacagcaggacacaggctattctgcagatccctgtgccaaagaccaagagacaggtgagggagttcctgggtactattgggtactgtagactgtggattcctggttttgcagagctggctcagccactgtatgctgccacaaggggaggcaatgatcctctggtgtggggagagaaggaagaggaagcattccagtctctgaagctggctctgactcagccacccgccctggcactgccttccctggacaagccattccagctgtttgtggaggaaacctcaggagcagctaagggcgtgctgactcaggctctgggtccttggaagagacccgtggcctacctgtctaagagactggaccctgttgctgcaggatggccaagatgcctgagggcaatcgctgccgcagctctgctgaccagagaggcttctaagctgaccttcggacaggacattgaaatcacctctagccataacctggagtccctgctgagatcacctccagacaagtggctgacaaatgccaggattacccagtatcaggtgctgctgctggaccctcctagagtgagattcaagcagacagccgcactgaaccccgctaccctgctgcctgagaccgatgacactctgccaatccaccattgtctggataccctggactctctgacaagcaccaggcctgatctgactgaccagccactggctcaggccgaagcaacactgttcaccgatggctcctcatacattagagacggaaagaggtatgctggagctgccgtggtgactctggattctgtgatttgggctgagcccctgcctatcggtactagcgcccagaaggcagaactgattgcactgacaaaggctctggagtggtctaaggataagagcgtgaacatctacactgattctaggtatgcttttgccacactgcacgtgcatggaatgatctacagagaaaggggcctgctgacagccggtgggaaggcaattaagaatgctccagagatcctggccctgctgactgcagtgtggctgcccaagagggtggctgtgatgcactgcaagggtcatcagaaggatgacgcccccactagcacagggaatagaagggctgatgaggtggccagagaagtggcaattaggccactgtccactcaggctacaatctca

SEQ ID NO: 256 - DNA, 2013 bp, Synthetic construct
  source 1..2013: mol_type = other DNA
accctgaatattgaggatgaatacagactgcacgagacctccaagggacccgatgtgcctctgggctctacttggctgagcgacttccctcaggcatgggctgaaaccggaggcatgggcctggccgtgaggcaggcacccctgattatccctctgagagctgcctccactccagtgtctattaagcagtacccaatgtctagggaggccagactgggaattaagccacatatccagagactgctggatcagggcatcctggtgccatgccagagcccctggaacacaccactgctgcccgtgaagaagcccgggaccaatgattataggcctgtgcaggacctgagggaggtgaacaagagagtggaagacattcacccaaccgtgcctaacccatacaatctgctgtctggactgcctccaagccatcagtggtatactgtgctggatctgaaggacgcattcttttgtctgaggctgcaccccacatcccagtcactgttcgcttttgagtggagagaccctgaaatgggtatctccgggcagctgacatggaccaggctgccacagggcttcaagaactcacccacactgtttgatgaggcactgcacagggatctggctgatttcaggattcagcatcctgacctgatcctgctgcagtatgtggatgacctgctgctggcagctacctccgaactggattgccagcagggtactagggctctgctgcagacactgggagacctgggctatagagcctcagcaaagaaggcccagatttgccagaagcaggtgaagtacctgggttatctgctgaaggaggggcagaggtggctgaccgaggctagaaaggaaactgtgatgggccagcccacccctaagactccaaggcagctgagagagttcctgggaaccgctgggttttgcaggctgtggattcccggtttcgccgaaatggccgcacctctgtacccactgactaagacaggaaccctgtttaagtggggcccagatcagcagaaggcttatcaggaaatcaagcaggccctgctgactgctcccgccctgggtctgcctgatctgacaaagccattcgagctgtttgtggacgaaaagcagggatacgccaagggcgtgctgactcagaagctgggaccttggagaaggccagtggcatatctgtctaagaagctggaccctgtggctgctggatggcccccttgcctgagaatggtggcagctattgccgtgctgacaaaggacgcaggaaagctgactatgggacagcccctggttattctggcacctcacgctgtggaggccctggtgaagcagccacccgacaggtggctgagcaatgcaagaatgacccattaccaggctctgctgctggatactgacagggtgcagttcgggccaattgtgaccctgaaccctgccactctgctgccactgcctgaggaaggtctgcagcacgattgtctggacatcctggcagaggctcatgggacaagacccgatctgaccgaccagcctctgccagatgctgaccatacatggtataccgatggctctagctttctgcaggagggtcagaggaaggcaggggccgcagtgaccactgagactgaagtgatttgggccaaggcactgcctgctggtacatctgcacagagagctgagctgatcgctctgacccaggccctgaagatggcagaaggaaagaagctgaacgtgtacactgactctaggtatgctttcgccacagcacacattcatggagaaatctacagaaggagaggtctgctgacaagcgaggggaaggaaattaagaacaaggaggaaatcctggctctgctgaaggccctgtttctgcctaagagactgtccattatccactgtccaggtcatcagaaggggaacagggctgaggccaggggaaatagaatggccgatcaggctgccagggaagtggctactagagagacaccagaaacttcaacactgctg

SEQ ID NO: 257 - DNA, 1680 bp, Synthetic construct
  source 1..1680: mol_type = other DNA
cctatttctccaatcgagaccgtgcctgtgaagctgaagccaggcatggatggccccaaggtgaagcagtggccactgacagaggaaaagattaaggctctggtggagatttgcaccgagatggaaaaggagggaaagatttctaagattgggcccgaaaacccttacaataccccagtgttcgctattaagaagaaggattcaactaagtggagaaagctggtggacttcagagaactgaacaagaggactcaggacttttgggaagtgcagctgggcattcctcaccctgcaggactgaagaagaagaagtctgtgacagtgctggatgtgggagacgcttacttttcagtgccactggatgaagacttcagaaagtatacagcctttaccattccatctatcaacaatgagacccccggaattagataccagtataacgtgctgcctcagggttggaaggggagcccagcaattttccagtctagcatgactaagatcctggagccctttagaaagcagaatcctgatattgtgatctaccagtatatggatgacctgtatgtgggtagcgacctggaaattgggcagcacaggactaagatcgaggaactgagacagcatctgctgagatggggtctgaccactccagataagaagcaccagaaggaacctccattcctgtggatggggtacgagctgcatcccgacaagtggactgtgcagccaattgtgctgcccgagaaggattcttggacagtgaacgacatccagaagctggtgggaaagctgaattgggccagccaaatctaccccggcatcaaggtgagacagctgtgcaagctgctgaggggtactaaggcactgacagaagtgattcctctgaccgaggaagctgaactggagctggccgaaaacagggagatcctgaaggaacccgtgcacggcgtgtactatgatccttccaaggacctgattgctgagatccagaagcagggtcaggggcagtggacctaccaaatctaccaggaacctttcaagaacctgaagactggaaagtacgcaagaatgaggggcgctcataccaatgatgtgaagcagctgactgaagcagtgcagaagattacaaccgagtcaattgtgatctggggaaagacacctaagtttaagctgccaatccagaaggaaacttgggagacatggtggaccgagtattggcaggctacttggattcctgaatgggagttcgtgaatacaccccctctggtgaagctgtggtatcagctggaaaaggagccaatcgtgggtgcagaaaccttttatgtggatggggctgccaacagagagacaaagctgggaaaggctggctacgtgaccaatagaggaaggcagaaggtggtgaccctgactgacactacaaaccagaagacagaactgcaggcaatctacctggctctgcaggattctggtctggaggttaatatcgtgaccgacagccagtatgccctggggattatccaggcacagccagatcagtccgaatcagagctggtgaaccagattatcgaacagctgattaagaaggagaaggtgtatctggcctgggtgcccgcacataagggaattggaggcaatgagcaggtggacaagctggtgtctgccggcatcaggaaggtgctg

SEQ ID NO: 258 - protein, 683 aa, Synthetic construct; identical to SEQ ID NO: 124

SEQ ID NO: 259 - protein, 683 aa, Synthetic construct
TLNIEDEHRLHETSKEPDVSLGSTWLSDFPQAWAETGGMGLAVRQAPLIIPLKATSTPVSIKQYPISQEARLGIKPHIQRLLDQGILVPCQSPWNTPLLPVKKPGTNDYRPVQDLREVNKRVEDIHPTVPNPYNLLSGLPPSHQWYTVLDLKDAFFCLRLHPTSQPLFAFEWRDPEMGISGQLTWTRLPQGFKNSPTLFNEALHRDLADFRIQHPDLILLQYVDDLLLAATSELDCQQGTRALLQTLGNLGYRASAKKAQICQKQVKYLGYLLKEGQRWLTEARKETVMGQPTPKTPRQLREFLGKAGFCRLFIPGFAEMAAPLYPLTKPGTLFNWGPDQQKAYQEIKQALLTAPALGLPDLTKPFELFVDEKQGYAKGVLTQKLGPWRRPVAYLSKKLDPVAAGWPPCLRMVAAIAVLTKDAGKLTMGQPLVILAPHAVEALVKQPPDRWLSNARMTHYQALLLDTDRVQFGPVVALNPATLLPLPEEGLQHNCLDILAEAHGTRPDLTDQPLPDADHTWYTDGSSLLQEGQRKAGAAVTTETEVIWAKALPAGTSAQRAELIALTQALKMAEGKKLNVYTDSRYAFATAHIHGEIYRRRGWLTSEGKEIKNKDEILALLKALFLPKRLSIIHCPGHQKGHSAEARGNRMADQAARKAAITETPDTSTLLIENSSPNSRLIN

SEQ ID NO: 260 - protein, 683 aa, Synthetic construct
TLNIEDEHRLHETSKEPDVSLGSTWLSDFPQAWAETGGMGLAVRQAPLIIPLKATSTPVSIKQYPLSQEARLGIKPHIQRLLDQGILVPCQSPWNTPLLPVKKPGTNDYRPVQDLREVNKRVEDIHPTVPNPYNLLSGLPPSHQWYTVLDLKDAFFCLRLHPTSQPLFAFEWRDPEMGISGQLTWTRLPQGFKNSPTLFNEALHRDLADFRIQHPDLILLQYVDDLLLAATSELDCQQGTRALLQTLGNLGYRASAKKAQICQKQVKYLGYLLKEGQRWLTEARKETVMGQPTPKTPRQLREFLGKAGFCRLFIPGFAEMAAPLYPLTKPGTLFNWGPDQQKAYQEIKQALLTAPALGLPDLTKPFELFVDEKQGYAKGVLTQKLGPWRRPVAYLSKKLDPVAAGWPPCLRMVAAIAVLTKDAGKLTMGQPLVILAPHAVEALVKQPPDRWLSNARMTHYQALLLDTDRVQFGPVVALNPATLLPLPEEGLQHNCLDILAEAHGTRPDLTDQPLPDADHTWYTDGSSLLQEGQRKAGAAVTTETEVIWAKALPAGTSAQRAELIALTQALKMAEGKKLNVYTDSRYAFATAHIHGEIYRRRGWLTSEGKEIKNKDEILALLKALFLPKRLSIIHCPGHQKGHSAEARGNRMADQAARKAAITETPDTSTLLIENSSPNSRLIN

SEQ ID NO: 261 - protein, 683 aa, Synthetic construct
TLNIEDEHRLHETSKEPDVSLGSTWLSDFPQAWAETGGMGLAVRQAPLIIPLKATSTPVSIKQYPVSQEARLGIKPHIQRLLDQGILVPCQSPWNTPLLPVKKPGTNDYRPVQDLREVNKRVEDIHPTVPNPYNLLSGLPPSHQWYTVLDLKDAFFCLRLHPTSQPLFAFEWRDPEMGISGQLTWTRLPQGFKNSPTLFNEALHRDLADFRIQHPDLILLQYVDDLLLAATSELDCQQGTRALLQTLGNLGYRASAKKAQICQKQVKYLGYLLKEGQRWLTEARKETVMGQPTPKTPRQLREFLGKAGFCRLFIPGFAEMAAPLYPLTKPGTLFNWGPDQQKAYQEIKQALLTAPALGLPDLTKPFELFVDEKQGYAKGVLTQKLGPWRRPVAYLSKKLDPVAAGWPPCLRMVAAIAVLTKDAGKLTMGQPLVILAPHAVEALVKQPPDRWLSNARMTHYQALLLDTDRVQFGPVVALNPATLLPLPEEGLQHNCLDILAEAHGTRPDLTDQPLPDADHTWYTDGSSLLQEGQRKAGAAVTTETEVIWAKALPAGTSAQRAELIALTQALKMAEGKKLNVYTDSRYAFATAHIHGEIYRRRGWLTSEGKEIKNKDEILALLKALFLPKRLSIIHCPGHQKGHSAEARGNRMADQAARKAAITETPDTSTLLIENSSPNSRLIN

SEQ ID NO: 262 - protein, 683 aa, Synthetic construct
TLNIEDEHRLHETSKEPDVSLGSTWLSDFPQAWAETGGMGLAVRQAPLIIPLKATSTPVSIKQYPNSQEARLGIKPHIQRLLDQGILVPCQSPWNTPLLPVKKPGTNDYRPVQDLREVNKRVEDIHPTVPNPYNLLSGLPPSHQWYTVLDLKDAFFCLRLHPTSQPLFAFEWRDPEMGISGQLTWTRLPQGFKNSPTLFNEALHRDLADFRIQHPDLILLQYVDDLLLAATSELDCQQGTRALLQTLGNLGYRASAKKAQICQKQVKYLGYLLKEGQRWLTEARKETVMGQPTPKTPRQLREFLGKAGFCRLFIPGFAEMAAPLYPLTKPGTLFNWGPDQQKAYQEIKQALLTAPALGLPDLTKPFELFVDEKQGYAKGVLTQKLGPWRRPVAYLSKKLDPVAAGWPPCLRMVAAIAVLTKDAGKLTMGQPLVILAPHAVEALVKQPPDRWLSNARMTHYQALLLDTDRVQFGPVVALNPATLLPLPEEGLQHNCLDILAEAHGTRPDLTDQPLPDADHTWYTDGSSLLQEGQRKAGAAVTTETEVIWAKALPAGTSAQRAELIALTQALKMAEGKKLNVYTDSRYAFATAHIHGEIYRRRGWLTSEGKEIKNKDEILALLKALFLPKRLSIIHCPGHQKGHSAEARGNRMADQAARKAAITETPDTSTLLIENSSPNSRLIN

SEQ ID NO: 263 - protein, 683 aa, Synthetic construct
TLNIEDEHRLHETSKEPDVSLGSTWLSDFPQAWAETGGMGLAVRQAPLIIPLKATSTPVSIKQYPKSQEARLGIKPHIQRLLDQGILVPCQSPWNTPLLPVKKPGTNDYRPVQDLREVNKRVEDIHPTVPNPYNLLSGLPPSHQWYTVLDLKDAFFCLRLHPTSQPLFAFEWRDPEMGISGQLTWTRLPQGFKNSPTLFNEALHRDLADFRIQHPDLILLQYVDDLLLAATSELDCQQGTRALLQTLGNLGYRASAKKAQICQKQVKYLGYLLKEGQRWLTEARKETVMGQPTPKTPRQLREFLGKAGFCRLFIPGFAEMAAPLYPLTKPGTLFNWGPDQQKAYQEIKQALLTAPALGLPDLTKPFELFVDEKQGYAKGVLTQKLGPWRRPVAYLSKKLDPVAAGWPPCLRMVAAIAVLTKDAGKLTMGQPLVILAPHAVEALVKQPPDRWLSNARMTHYQALLLDTDRVQFGPVVALNPATLLPLPEEGLQHNCLDILAEAHGTRPDLTDQPLPDADHTWYTDGSSLLQEGQRKAGAAVTTETEVIWAKALPAGTSAQRAELIALTQALKMAEGKKLNVYTDSRYAFATAHIHGEIYRRRGWLTSEGKEIKNKDEILALLKALFLPKRLSIIHCPGHQKGHSAEARGNRMADQAARKAAITETPDTSTLLIENSSPNSRLIN

SEQ ID NO: 264 - protein, 683 aa, Synthetic construct
TLNIEDEHRLHETSKEPDVSLGSTWLSDFPQAWAETGGMGLAVRQAPLIIPLKATSTPVSIKQYPMSQEARLGIKPHIQRLLDQGILVPCQSPWNTPLLPVKKPGTNDYRPVQDLREVNKRVEDIHPTVPNPYNLLSGLPPSHQWYTVLDLKDAFFCLRLYPTSQPLFAFEWRDPEMGISGQLTWTRLPQGFKNSPTLFNEALHRDLADFRIQHPDLILLQYVDDLLLAATSELDCQQGTRALLQTLGNLGYRASAKKAQICQKQVKYLGYLLKEGQRWLTEARKETVMGQPTPKTPRQLREFLGKAGFCRLFIPGFAEMAAPLYPLTKPGTLFNWGPDQQKAYQEIKQALLTAPALGLPDLTKPFELFVDEKQGYAKGVLTQKLGPWRRPVAYLSKKLDPVAAGWPPCLRMVAAIAVLTKDAGKLTMGQPLVILAPHAVEALVKQPPDRWLSNARMTHYQALLLDTDRVQFGPVVALNPATLLPLPEEGLQHNCLDILAEAHGTRPDLTDQPLPDADHTWYTDGSSLLQEGQRKAGAAVTTETEVIWAKALPAGTSAQRAELIALTQALKMAEGKKLNVYTDSRYAFATAHIHGEIYRRRGWLTSEGKEIKNKDEILALLKALFLPKRLSIIHCPGHQKGHSAEARGNRMADQAARKAAITETPDTSTLLIENSSPNSRLIN

SEQ ID NO: 265 - protein, 683 aa, Synthetic construct
TLNIEDEHRLHETSKEPDVSLGSTWLSDFPQAWAETGGMGLAVRQAPLIIPLKATSTPVSIKQYPMSQEARLGIKPHIQRLLDQGILVPCQSPWNTPLLPVKKPGTNDYRPVQDLREVNKRVEDIHPTVPNPYNLLSGLPPSHQWYTVLDLKDAFFCLRLLPTSQPLFAFEWRDPEMGISGQLTWTRLPQGFKNSPTLFNEALHRDLADFRIQHPDLILLQYVDDLLLAATSELDCQQGTRALLQTLGNLGYRASAKKAQICQKQVKYLGYLLKEGQRWLTEARKETVMGQPTPKTPRQLREFLGKAGFCRLFIPGFAEMAAPLYPLTKPGTLFNWGPDQQKAYQEIKQALLTAPALGLPDLTKPFELFVDEKQGYAKGVLTQKLGPWRRPVAYLSKKLDPVAAGWPPCLRMVAAIAVLTKDAGKLTMGQPLVILAPHAVEALVKQPPDRWLSNARMTHYQALLLDTDRVQFGPVVALNPATLLPLPEEGLQHNCLDILAEAHGTRPDLTDQPLPDADHTWYTDGSSLLQEGQRKAGAAVTTETEVIWAKALPAGTSAQRAELIALTQALKMAEGKKLNVYTDSRYAFATAHIHGEIYRRRGWLTSEGKEIKNKDEILALLKALFLPKRLSIIHCPGHQKGHSAEARGNRMADQAARKAAITETPDTSTLLIENSSPNSRLIN

SEQ ID NO: 266 - protein, 683 aa, Synthetic construct
TLNIEDEHRLHETSKEPDVSLGSTWLSDFPQAWAETGGMGLAVRQAPLIIPLKATSTPVSIKQYPMSQEARLGIKPHIQRLLDQGILVPCQSPWNTPLLPVKKPGTNDYRPVQDLREVNKRVEDIHPTVPNPYNLLSGLPPSHQWYTVLDLKDAFFCLRLAPTSQPLFAFEWRDPEMGISGQLTWTRLPQGFKNSPTLFNEALHRDLADFRIQHPDLILLQYVDDLLLAATSELDCQQGTRALLQTLGNLGYRASAKKAQICQKQVKYLGYLLKEGQRWLTEARKETVMGQPTPKTPRQLREFLGKAGFCRLFIPGFAEMAAPLYPLTKPGTLFNWGPDQQKAYQEIKQALLTAPALGLPDLTKPFELFVDEKQGYAKGVLTQKLGPWRRPVAYLSKKLDPVAAGWPPCLRMVAAIAVLTKDAGKLTMGQPLVILAPHAVEALVKQPPDRWLSNARMTHYQALLLDTDRVQFGPVVALNPATLLPLPEEGLQHNCLDILAEAHGTRPDLTDQPLPDADHTWYTDGSSLLQEGQRKAGAAVTTETEVIWAKALPAGTSAQRAELIALTQALKMAEGKKLNVYTDSRYAFATAHIHGEIYRRRGWLTSEGKEIKNKDEILALLKALFLPKRLSIIHCPGHQKGHSAEARGNRMADQAARKAAITETPDTSTLLIENSSPNSRLIN

SEQ ID NO: 267 - protein, 683 aa, Synthetic construct
TLNIEDEHRLHETSKEPDVSLGSTWLSDFPQAWAETGGMGLAVRQAPLIIPLKATSTPVSIKQYPMSQEARLGIKPHIQRLLDQGILVPCQSPWNTPLLPVKKPGTNDYRPVQDLREVNKRVEDIHPTVPNPYNLLSGLPPSHQWYTVLDLKDAFFCLRLDPTSQPLFAFEWRDPEMGISGQLTWTRLPQGFKNSPTLFNEALHRDLADFRIQHPDLILLQYVDDLLLAATSELDCQQGTRALLQTLGNLGYRASAKKAQICQKQVKYLGYLLKEGQRWLTEARKETVMGQPTPKTPRQLREFLGKAGFCRLFIPGFAEMAAPLYPLTKPGTLFNWGPDQQKAYQEIKQALLTAPALGLPDLTKPFELFVDEKQGYAKGVLTQKLGPWRRPVAYLSKKLDPVAAGWPPCLRMVAAIAVLTKDAGKLTMGQPLVILAPHAVEALVKQPPDRWLSNARMTHYQALLLDTDRVQFGPVVALNPATLLPLPEEGLQHNCLDILAEAHGTRPDLTDQPLPDADHTWYTDGSSLLQEGQRKAGAAVTTETEVIWAKALPAGTSAQRAELIALTQALKMAEGKKLNVYTDSRYAFATAHIHGEIYRRRGWLTSEGKEIKNKDEILALLKALFLPKRLSIIHCPGHQKGHSAEARGNRMADQAARKAAITETPDTSTLLIENSSPNSRLIN

SEQ ID NO: 268 - protein, 683 aa, Synthetic construct
TLNIEDEHRLHETSKEPDVSLGSTWLSDFPQAWAETGGMGLAVRQAPLIIPLKATSTPVSIKQYPMSQEARLGIKPHIQRLLDQGILVPCQSPWNTPLLPVKKPGTNDYRPVQDLREVNKRVEDIHPTVPNPYNLLSGLPPSHQWYTVLDLKDAFFCLRLTPTSQPLFAFEWRDPEMGISGQLTWTRLPQGFKNSPTLFNEALHRDLADFRIQHPDLILLQYVDDLLLAATSELDCQQGTRALLQTLGNLGYRASAKKAQICQKQVKYLGYLLKEGQRWLTEARKETVMGQPTPKTPRQLREFLGKAGFCRLFIPGFAEMAAPLYPLTKPGTLFNWGPDQQKAYQEIKQALLTAPALGLPDLTKPFELFVDEKQGYAKGVLTQKLGPWRRPVAYLSKKLDPVAAGWPPCLRMVAAIAVLTKDAGKLTMGQPLVILAPHAVEALVKQPPDRWLSNARMTHYQALLLDTDRVQFGPVVALNPATLLPLPEEGLQHNCLDILAEAHGTRPDLTDQPLPDADHTWYTDGSSLLQEGQRKAGAAVTTETEVIWAKALPAGTSAQRAELIALTQALKMAEGKKLNVYTDSRYAFATAHIHGEIYRRRGWLTSEGKEIKNKDEILALLKALFLPKRLSIIHCPGHQKGHSAEARGNRMADQAARKAAITETPDTSTLLIENSSPNSRLIN

SEQ ID NO: 269 - protein, 683 aa, Synthetic construct
TLNIEDEHRLHETSKEPDVSLGSTWLSDFPQAWAETGGMGLAVRQAPLIIPLKATSTPVSIKQYPMSQEARLGIKPHIQRLLDQGILVPCQSPWNTPLLPVKKPGTNDYRPVQDLREVNKRVEDIHPTVPNPYNLLSGLPPSHQWYTVLDLKDAFFCLRLHPTSQPLVAFEWRDPEMGISGQLTWTRLPQGFKNSPTLFNEALHRDLADFRIQHPDLILLQYVDDLLLAATSELDCQQGTRALLQTLGNLGYRASAKKAQICQKQVKYLGYLLKEGQRWLTEARKETVMGQPTPKTPRQLREFLGKAGFCRLFIPGFAEMAAPLYPLTKPGTLFNWGPDQQKAYQEIKQALLTAPALGLPDLTKPFELFVDEKQGYAKGVLTQKLGPWRRPVAYLSKKLDPVAAGWPPCLRMVAAIAVLTKDAGKLTMGQPLVILAPHAVEALVKQPPDRWLSNARMTHYQALLLDTDRVQFGPVVALNPATLLPLPEEGLQHNCLDILAEAHGTRPDLTDQPLPDADHTWYTDGSSLLQEGQRKAGAAVTTETEVIWAKALPAGTSAQRAELIALTQALKMAEGKKLNVYTDSRYAFATAHIHGEIYRRRGWLTSEGKEIKNKDEILALLKALFLPKRLSIIHCPGHQKGHSAEARGNRMADQAARKAAITETPDTSTLLIENSSPNSRLIN

SEQ ID NO: 270 - protein, 683 aa, Synthetic construct
TLNIEDEHRLHETSKEPDVSLGSTWLSDFPQAWAETGGMGLAVRQAPLIIPLKATSTPVSIKQYPMSQEARLGIKPHIQRLLDQGILVPCQSPWNTPLLPVKKPGTNDYRPVQDLREVNKRVEDIHPTVPNPYNLLSGLPPSHQWYTVLDLKDAFFCLRLHPTSQPLMAFEWRDPEMGISGQLTWTRLPQGFKNSPTLFNEALHRDLADFRIQHPDLILLQYVDDLLLAATSELDCQQGTRALLQTLGNLGYRASAKKAQICQKQVKYLGYLLKEGQRWLTEARKETVMGQPTPKTPRQLREFLGKAGFCRLFIPGFAEMAAPLYPLTKPGTLFNWGPDQQKAYQEIKQALLTAPALGLPDLTKPFELFVDEKQGYAKGVLTQKLGPWRRPVAYLSKKLDPVAAGWPPCLRMVAAIAVLTKDAGKLTMGQPLVILAPHAVEALVKQPPDRWLSNARMTHYQALLLDTDRVQFGPVVALNPATLLPLPEEGLQHNCLDILAEAHGTRPDLTDQPLPDADHTWYTDGSSLLQEGQRKAGAAVTTETEVIWAKALPAGTSAQRAELIALTQALKMAEGKKLNVYTDSRYAFATAHIHGEIYRRRGWLTSEGKEIKNKDEILALLKALFLPKRLSIIHCPGHQKGHSAEARGNRMADQAARKAAITETPDTSTLLIENSSPNSRLIN

SEQ ID NO: 271 - protein, 683 aa, Synthetic construct
TLNIEDEHRLHETSKEPDVSLGSTWLSDFPQAWAETGGMGLAVRQAPLIIPLKATSTPVSIKQYPMSQEARLGIKPHIQRLLDQGILVPCQSPWNTPLLPVKKPGTNDYRPVQDLREVNKRVEDIHPTVPNPYNLLSGLPPSHQWYTVLDLKDAFFCLRLHPTSQPLCAFEWRDPEMGISGQLTWTRLPQGFKNSPTLFNEALHRDLADFRIQHPDLILLQYVDDLLLAATSELDCQQGTRALLQTLGNLGYRASAKKAQICQKQVKYLGYLLKEGQRWLTEARKETVMGQPTPKTPRQLREFLGKAGFCRLFIPGFAEMAAPLYPLTKPGTLFNWGPDQQKAYQEIKQALLTAPALGLPDLTKPFELFVDEKQGYAKGVLTQKLGPWRRPVAYLSKKLDPVAAGWPPCLRMVAAIAVLTKDAGKLTMGQPLVILAPHAVEALVKQPPDRWLSNARMTHYQALLLDTDRVQFGPVVALNPATLLPLPEEGLQHNCLDILAEAHGTRPDLTDQPLPDADHTWYTDGSSLLQEGQRKAGAAVTTETEVIWAKALPAGTSAQRAELIALTQALKMAEGKKLNVYTDSRYAFATAHIHGEIYRRRGWLTSEGKEIKNKDEILALLKALFLPKRLSIIHCPGHQKGHSAEARGNRMADQAARKAAITETPDTSTLLIENSSPNSRLIN

SEQ ID NO: 272 - protein, 683 aa, Synthetic construct
TLNIEDEHRLHETSKEPDVSLGSTWLSDFPQAWAETGGMGLAVRQAPLIIPLKATSTPVSIKQYPMSQEARLGIKPHIQRLLDQGILVPCQSPWNTPLLPVKKPGTNDYRPVQDLREVNKRVEDIHPTVPNPYNLLSGLPPSHQWYTVLDLKDAFFCLRLHPTSQPLHAFEWRDPEMGISGQLTWTRLPQGFKNSPTLFNEALHRDLADFRIQHPDLILLQYVDDLLLAATSELDCQQGTRALLQTLGNLGYRASAKKAQICQKQVKYLGYLLKEGQRWLTEARKETVMGQPTPKTPRQLREFLGKAGFCRLFIPGFAEMAAPLYPLTKPGTLFNWGPDQQKAYQEIKQALLTAPALGLPDLTKPFELFVDEKQGYAKGVLTQKLGPWRRPVAYLSKKLDPVAAGWPPCLRMVAAIAVLTKDAGKLTMGQPLVILAPHAVEALVKQPPDRWLSNARMTHYQALLLDTDRVQFGPVVALNPATLLPLPEEGLQHNCLDILAEAHGTRPDLTDQPLPDADHTWYTDGSSLLQEGQRKAGAAVTTETEVIWAKALPAGTSAQRAELIALTQALKMAEGKKLNVYTDSRYAFATAHIHGEIYRRRGWLTSEGKEIKNKDEILALLKALFLPKRLSIIHCPGHQKGHSAEARGNRMADQAARKAAITETPDTSTLLIENSSPNSRLIN

SEQ ID NO: 273 - protein, 683 aa, Synthetic construct
TLNIEDEHRLHETSKEPDVSLGSTWLSDFPQAWAETGGMGLAVRQAPLIIPLKATSTPVSIKQYPMSQEARLGIKPHIQRLLDQGILVPCQSPWNTPLLPVKKPGTNDYRPVQDLREVNKRVEDIHPTVPNPYNLLSGLPPSHQWYTVLDLKDAFFCLRLHPTSQPLFAFNWRDPEMGISGQLTWTRLPQGFKNSPTLFNEALHRDLADFRIQHPDLILLQYVDDLLLAATSELDCQQGTRALLQTLGNLGYRASAKKAQICQKQVKYLGYLLKEGQRWLTEARKETVMGQPTPKTPRQLREFLGKAGFCRLFIPGFAEMAAPLYPLTKPGTLFNWGPDQQKAYQEIKQALLTAPALGLPDLTKPFELFVDEKQGYAKGVLTQKLGPWRRPVAYLSKKLDPVAAGWPPCLRMVAAIAVLTKDAGKLTMGQPLVILAPHAVEALVKQPPDRWLSNARMTHYQALLLDTDRVQFGPVVALNPATLLPLPEEGLQHNCLDILAEAHGTRPDLTDQPLPDADHTWYTDGSSLLQEGQRKAGAAVTTETEVIWAKALPAGTSAQRAELIALTQALKMAEGKKLNVYTDSRYAFATAHIHGEIYRRRGWLTSEGKEIKNKDEILALLKALFLPKRLSIIHCPGHQKGHSAEARGNRMADQAARKAAITETPDTSTLLIENSSPNSRLIN

SEQ ID NO: 274 - protein, 683 aa, Synthetic construct
TLNIEDEHRLHETSKEPDVSLGSTWLSDFPQAWAETGGMGLAVRQAPLIIPLKATSTPVSIKQYPMSQEARLGIKPHIQRLLDQGILVPCQSPWNTPLLPVKKPGTNDYRPVQDLREVNKRVEDIHPTVPNPYNLLSGLPPSHQWYTVLDLKDAFFCLRLHPTSQPLFAFVWRDPEMGISGQLTWTRLPQGFKNSPTLFNEALHRDLADFRIQHPDLILLQYVDDLLLAATSELDCQQGTRALLQTLGNLGYRASAKKAQICQKQVKYLGYLLKEGQRWLTEARKETVMGQPTPKTPRQLREFLGKAGFCRLFIPGFAEMAAPLYPLTKPGTLFNWGPDQQKAYQEIKQALLTAPALGLPDLTKPFELFVDEKQGYAKGVLTQKLGPWRRPVAYLSKKLDPVAAGWPPCLRMVAAIAVLTKDAGKLTMGQPLVILAPHAVEALVKQPPDRWLSNARMTHYQALLLDTDRVQFGPVVALNPATLLPLPEEGLQHNCLDILAEAHGTRPDLTDQPLPDADHTWYTDGSSLLQEGQRKAGAAVTTETEVIWAKALPAGTSAQRAELIALTQALKMAEGKKLNVYTDSRYAFATAHIHGEIYRRRGWLTSEGKEIKNKDEILALLKALFLPKRLSIIHCPGHQKGHSAEARGNRMADQAARKAAITETPDTSTLLIENSSPNSRLIN

SEQ ID NO: 275 - protein, 683 aa, Synthetic construct
TLNIEDEHRLHETSKEPDVSLGSTWLSDFPQAWAETGGMGLAVRQAPLIIPLKATSTPVSIKQYPMSQEARLGIKPHIQRLLDQGILVPCQSPWNTPLLPVKKPGTNDYRPVQDLREVNKRVEDIHPTVPNPYNLLSGLPPSHQWYTVLDLKDAFFCLRLHPTSQPLFAFDWRDPEMGISGQLTWTRLPQGFKNSPTLFNEALHRDLADFRIQHPDLILLQYVDDLLLAATSELDCQQGTRALLQTLGNLGYRASAKKAQICQKQVKYLGYLLKEGQRWLTEARKETVMGQPTPKTPRQLREFLGKAGFCRLFIPGFAEMAAPLYPLTKPGTLFNWGPDQQKAYQEIKQALLTAPALGLPDLTKPFELFVDEKQGYAKGVLTQKLGPWRRPVAYLSKKLDPVAAGWPPCLRMVAAIAVLTKDAGKLTMGQPLVILAPHAVEALVKQPPDRWLSNARMTHYQALLLDTDRVQFGPVVALNPATLLPLPEEGLQHNCLDILAEAHGTRPDLTDQPLPDADHTWYTDGSSLLQEGQRKAGAAVTTETEVIWAKALPAGTSAQRAELIALTQALKMAEGKKLNVYTDSRYAFATAHIHGEIYRRRGWLTSEGKEIKNKDEILALLKALFLPKRLSIIHCPGHQKGHSAEARGNRMADQAARKAAITETPDTSTLLIENSSPNSRLIN

SEQ ID NO: 276 - protein, 683 aa, Synthetic construct
TLNIEDEHRLHETSKEPDVSLGSTWLSDFPQAWAETGGMGLAVRQAPLIIPLKATSTPVSIKQYPMSQEARLGIKPHIQRLLDQGILVPCQSPWNTPLLPVKKPGTNDYRPVQDLREVNKRVEDIHPTVPNPYNLLSGLPPSHQWYTVLDLKDAFFCLRLHPTSQPLFAFYWRDPEMGISGQLTWTRLPQGFKNSPTLFNEALHRDLADFRIQHPDLILLQYVDDLLLAATSELDCQQGTRALLQTLGNLGYRASAKKAQICQKQVKYLGYLLKEGQRWLTEARKETVMGQPTPKTPRQLREFLGKAGFCRLFIPGFAEMAAPLYPLTKPGTLFNWGPDQQKAYQEIKQALLTAPALGLPDLTKPFELFVDEKQGYAKGVLTQKLGPWRRPVAYLSKKLDPVAAGWPPCLRMVAAIAVLTKDAGKLTMGQPLVILAPHAVEALVKQPPDRWLSNARMTHYQALLLDTDRVQFGPVVALNPATLLPLPEEGLQHNCLDILAEAHGTRPDLTDQPLPDADHTWYTDGSSLLQEGQRKAGAAVTTETEVIWAKALPAGTSAQRAELIALTQALKMAEGKKLNVYTDSRYAFATAHIHGEIYRRRGWLTSEGKEIKNKDEILALLKALFLPKRLSIIHCPGHQKGHSAEARGNRMADQAARKAAITETPDTSTLLIENSSPNSRLIN

SEQ ID NO: 277 - protein, 683 aa, Synthetic construct
TLNIEDEHRLHETSKEPDVSLGSTWLSDFPQAWAETGGMGLAVRQAPLIIPLKATSTPVSIKQYPMSQEARLGIKPHIQRLLDQGILVPCQSPWNTPLLPVKKPGTNDYRPVQDLREVNKRVEDIHPTVPNPYNLLSGLPPSHQWYTVLDLKDAFFCLRLHPTSQPLFAFFWRDPEMGISGQLTWTRLPQGFKNSPTLFNEALHRDLADFRIQHPDLILLQYVDDLLLAATSELDCQQGTRALLQTLGNLGYRASAKKAQICQKQVKYLGYLLKEGQRWLTEARKETVMGQPTPKTPRQLREFLGKAGFCRLFIPGFAEMAAPLYPLTKPGTLFNWGPDQQKAYQEIKQALLTAPALGLPDLTKPFELFVDEKQGYAKGVLTQKLGPWRRPVAYLSKKLDPVAAGWPPCLRMVAAIAVLTKDAGKLTMGQPLVILAPHAVEALVKQPPDRWLSNARMTHYQALLLDTDRVQFGPVVALNPATLLPLPEEGLQHNCLDILAEAHGTRPDLTDQPLPDADHTWYTDGSSLLQEGQRKAGAAVTTETEVIWAKALPAGTSAQRAELIALTQALKMAEGKKLNVYTDSRYAFATAHIHGEIYRRRGWLTSEGKEIKNKDEILALLKALFLPKRLSIIHCPGHQKGHSAEARGNRMADQAARKAAITETPDTSTLLIENSSPNSRLIN

SEQ ID NO: 278 - protein, 683 aa, Synthetic construct
TLNIEDEHRLHETSKEPDVSLGSTWLSDFPQAWAETGGMGLAVRQAPLIIPLKATSTPVSIKQYPMSQEARLGIKPHIQRLLDQGILVPCQSPWNTPLLPVKKPGTNDYRPVQDLREVNKRVEDIHPTVPNPYNLLSGGPPSHQWYTVLDLKDAFFCLRLHPTSQPLFAFEWRDPEMGISGQLTWTRLPQGFKNSPTLFNEALHRDLADFRIQHPDLILLQYVDDLLLAATSELDCQQGTRALLQTLGNLGYRASAKKAQICQKQVKYLGYLLKEGQRWLTEARKETVMGQPTPKTPRQLREFLGKAGFCRLFIPGFAEMAAPLYPLTKPGTLFNWGPDQQKAYQEIKQALLTAPALGLPDLTKPFELFVDEKQGYAKGVLTQKLGPWRRPVAYLSKKLDPVAAGWPPCLRMVAAIAVLTKDAGKLTMGQPLVILAPHAVEALVKQPPDRWLSNARMTHYQALLLDTDRVQFGPVVALNPATLLPLPEEGLQHNCLDILAEAHGTRPDLTDQPLPDADHTWYTDGSSLLQEGQRKAGAAVTTETEVIWAKALPAGTSAQRAELIALTQALKMAEGKKLNVYTDSRYAFATAHIHGEIYRRRGWLTSEGKEIKNKDEILALLKALFLPKRLSIIHCPGHQKGHSAEARGNRMADQAARKAAITETPDTSTLLIENSSPNSRLIN

SEQ ID NO: 279 - protein, 683 aa, Synthetic construct
TLNIEDEHRLHETSKEPDVSLGSTWLSDFPQAWAETGGMGLAVRQAPLIIPLKATSTPVSIKQYPMSQEARLGIKPHIQRLLDQGILVPCQSPWNTPLLPVKKPGTNDYRPVQDLREVNKRVEDIHPTVPNPYNLLSGYPPSHQWYTVLDLKDAFFCLRLHPTSQPLFAFEWRDPEMGISGQLTWTRLPQGFKNSPTLFNEALHRDLADFRIQHPDLILLQYVDDLLLAATSELDCQQGTRALLQTLGNLGYRASAKKAQICQKQVKYLGYLLKEGQRWLTEARKETVMGQPTPKTPRQLREFLGKAGFCRLFIPGFAEMAAPLYPLTKPGTLFNWGPDQQKAYQEIKQALLTAPALGLPDLTKPFELFVDEKQGYAKGVLTQKLGPWRRPVAYLSKKLDPVAAGWPPCLRMVAAIAVLTKDAGKLTMGQPLVILAPHAVEALVKQPPDRWLSNARMTHYQALLLDTDRVQFGPVVALNPATLLPLPEEGLQHNCLDILAEAHGTRPDLTDQPLPDADHTWYTDGSSLLQEGQRKAGAAVTTETEVIWAKALPAGTSAQRAELIALTQALKMAEGKKLNVYTDSRYAFATAHIHGEIYRRRGWLTSEGKEIKNKDEILALLKALFLPKRLSIIHCPGHQKGHSAEARGNRMADQAARKAAITETPDTSTLLIENSSPNSRLIN

SEQ ID NO: 280 - protein, 683 aa, Synthetic construct
TLNIEDEHRLHETSKEPDVSLGSTWLSDFPQAWAETGGMGLAVRQAPLIIPLKATSTPVSIKQYPMSQEARLGIKPHIQRLLDQGILVPCQSPWNTPLLPVKKPGTNDYRPVQDLREVNKRVEDIHPTVPNPYNLLSGFPPSHQWYTVLDLKDAFFCLRLHPTSQPLFAFEWRDPEMGISGQLTWTRLPQGFKNSPTLFNEALHRDLADFRIQHPDLILLQYVDDLLLAATSELDCQQGTRALLQTLGNLGYRASAKKAQICQKQVKYLGYLLKEGQRWLTEARKETVMGQPTPKTPRQLREFLGKAGFCRLFIPGFAEMAAPLYPLTKPGTLFNWGPDQQKAYQEIKQALLTAPALGLPDLTKPFELFVDEKQGYAKGVLTQKLGPWRRPVAYLSKKLDPVAAGWPPCLRMVAAIAVLTKDAGKLTMGQPLVILAPHAVEALVKQPPDRWLSNARMTHYQALLLDTDRVQFGPVVALNPATLLPLPEEGLQHNCLDILAEAHGTRPDLTDQPLPDADHTWYTDGSSLLQEGQRKAGAAVTTETEVIWAKALPAGTSAQRAELIALTQALKMAEGKKLNVYTDSRYAFATAHIHGEIYRRRGWLTSEGKEIKNKDEILALLKALFLPKRLSIIHCPGHQKGHSAEARGNRMADQAARKAAITETPDTSTLLIENSSPNSRLIN

SEQ ID NO: 281 - protein, 683 aa, Synthetic construct
TLNIEDEHRLHETSKEPDVSLGSTWLSDFPQAWAETGGMGLAVRQAPLIIPLKATSTPVSIKQYPMSQEARLGIKPHIQRLLDQGILVPCQSPWNTPLLPVKKPGTNDYRPVQDLREVNKRVEDIHPTVPNPYNLLSGAPPSHQWYTVLDLKDAFFCLRLHPTSQPLFAFEWRDPEMGISGQLTWTRLPQGFKNSPTLFNEALHRDLADFRIQHPDLILLQYVDDLLLAATSELDCQQGTRALLQTLGNLGYRASAKKAQICQKQVKYLGYLLKEGQRWLTEARKETVMGQPTPKTPRQLREFLGKAGFCRLFIPGFAEMAAPLYPLTKPGTLFNWGPDQQKAYQEIKQALLTAPALGLPDLTKPFELFVDEKQGYAKGVLTQKLGPWRRPVAYLSKKLDPVAAGWPPCLRMVAAIAVLTKDAGKLTMGQPLVILAPHAVEALVKQPPDRWLSNARMTHYQALLLDTDRVQFGPVVALNPATLLPLPEEGLQHNCLDILAEAHGTRPDLTDQPLPDADHTWYTDGSSLLQEGQRKAGAAVTTETEVIWAKALPAGTSAQRAELIALTQALKMAEGKKLNVYTDSRYAFATAHIHGEIYRRRGWLTSEGKEIKNKDEILALLKALFLPKRLSIIHCPGHQKGHSAEARGNRMADQAARKAAITETPDTSTLLIENSSPNSRLIN

SEQ ID NO: 282 - protein, 683 aa, Synthetic construct
TLNIEDEHRLHETSKEPDVSLGSTWLSDFPQAWAETGGMGLAVRQAPLIIPLKATSTPVSIKQYPMSQEARLGIKPHIQRLLDQGILVPCQSPWNTPLLPVKKPGTNDYRPVQDLREVNKRVEDIHPTVPNPYNLLSGIPPSHQWYTVLDLKDAFFCLRLHPTSQPLFAFEWRDPEMGISGQLTWTRLPQGFKNSPTLFNEALHRDLADFRIQHPDLILLQYVDDLLLAATSELDCQQGTRALLQTLGNLGYRASAKKAQICQKQVKYLGYLLKEGQRWLTEARKETVMGQPTPKTPRQLREFLGKAGFCRLFIPGFAEMAAPLYPLTKPGTLFNWGPDQQKAYQEIKQALLTAPALGLPDLTKPFELFVDEKQGYAKGVLTQKLGPWRRPVAYLSKKLDPVAAGWPPCLRMVAAIAVLTKDAGKLTMGQPLVILAPHAVEALVKQPPDRWLSNARMTHYQALLLDTDRVQFGPVVALNPATLLPLPEEGLQHNCLDILAEAHGTRPDLTDQPLPDADHTWYTDGSSLLQEGQRKAGAAVTTETEVIWAKALPAGTSAQRAELIALTQALKMAEGKKLNVYTDSRYAFATAHIHGEIYRRRGWLTSEGKEIKNKDEILALLKALFLPKRLSIIHCPGHQKGHSAEARGNRMADQAARKAAITETPDTSTLLIENSSPNSRLIN

SEQ ID NO: 283 - protein, 683 aa, Synthetic construct
TLNIEDEHRLHETSKEPDVSLGSTWLSDFPQAWAETGGMGLAVRQAPLIIPLKATSTPVSIKQYPMSQEARLGIKPHIQRLLDQGILVPCQSPWNTPLLPVKKPGTNDYRPVQDLREVNKRVEDIHPTVPNPYNLLSGCPPSHQWYTVLDLKDAFFCLRLHPTSQPLFAFEWRDPEMGISGQLTWTRLPQGFKNSPTLFNEALHRDLADFRIQHPDLILLQYVDDLLLAATSELDCQQGTRALLQTLGNLGYRASAKKAQICQKQVKYLGYLLKEGQRWLTEARKETVMGQPTPKTPRQLREFLGKAGFCRLFIPGFAEMAAPLYPLTKPGTLFNWGPDQQKAYQEIKQALLTAPALGLPDLTKPFELFVDEKQGYAKGVLTQKLGPWRRPVAYLSKKLDPVAAGWPPCLRMVAAIAVLTKDAGKLTMGQPLVILAPHAVEALVKQPPDRWLSNARMTHYQALLLDTDRVQFGPVVALNPATLLPLPEEGLQHNCLDILAEAHGTRPDLTDQPLPDADHTWYTDGSSLLQEGQRKAGAAVTTETEVIWAKALPAGTSAQRAELIALTQALKMAEGKKLNVYTDSRYAFATAHIHGEIYRRRGWLTSEGKEIKNKDEILALLKALFLPKRLSIIHCPGHQKGHSAEARGNRMADQAARKAAITETPDTSTLLIENSSPNSRLIN

SEQ ID NO: 284 - protein, 683 aa, Synthetic construct
TLNIEDEHRLHETSKEPDVSLGSTWLSDFPQAWAETGGMGLAVRQAPLIIPLKATSTPVSIKQYPMSQEARLGIKPHIQRLLDQGILVPCQSPWNTPLLPVKKPGTNDYRPVQDLREVNKRVEDIHPTVPNPYNLLSGLPPSHQWYTVLDLKDAFFCLRLHPTSQPLFAFEWRDPEMGISGQLTWTRLPQGFKNSPTLFNEALHRDLADFRIQHPDLILLQYCDDLLLAATSELDCQQGTRALLQTLGNLGYRASAKKAQICQKQVKYLGYLLKEGQRWLTEARKETVMGQPTPKTPRQLREFLGKAGFCRLFIPGFAEMAAPLYPLTKPGTLFNWGPDQQKAYQEIKQALLTAPALGLPDLTKPFELFVDEKQGYAKGVLTQKLGPWRRPVAYLSKKLDPVAAGWPPCLRMVAAIAVLTKDAGKLTMGQPLVILAPHAVEALVKQPPDRWLSNARMTHYQALLLDTDRVQFGPVVALNPATLLPLPEEGLQHNCLDILAEAHGTRPDLTDQPLPDADHTWYTDGSSLLQEGQRKAGAAVTTETEVIWAKALPAGTSAQRAELIALTQALKMAEGKKLNVYTDSRYAFATAHIHGEIYRRRGWLTSEGKEIKNKDEILALLKALFLPKRLSIIHCPGHQKGHSAEARGNRMADQAARKAAITETPDTSTLLIENSSPNSRLIN

SEQ ID NO: 285 - protein, 683 aa, Synthetic construct
TLNIEDEHRLHETSKEPDVSLGSTWLSDFPQAWAETGGMGLAVRQAPLIIPLKATSTPVSIKQYPMSQEARLGIKPHIQRLLDQGILVPCQSPWNTPLLPVKKPGTNDYRPVQDLREVNKRVEDIHPTVPNPYNLLSGLPPSHQWYTVLDLKDAFFCLRLHPTSQPLFAFEWRDPEMGISGQLTWTRLPQGFKNSPTLFNEALHRDLADFRIQHPDLILLQYMDDLLLAATSELDCQQGTRALLQTLGNLGYRASAKKAQICQKQVKYLGYLLKEGQRWLTEARKETVMGQPTPKTPRQLREFLGKAGFCRLFIPGFAEMAAPLYPLTKPGTLFNWGPDQQKAYQEIKQALLTAPALGLPDLTKPFELFVDEKQGYAKGVLTQKLGPWRRPVAYLSKKLDPVAAGWPPCLRMVAAIAVLTKDAGKLTMGQPLVILAPHAVEALVKQPPDRWLSNARMTHYQALLLDTDRVQFGPVVALNPATLLPLPEEGLQHNCLDILAEAHGTRPDLTDQPLPDADHTWYTDGSSLLQEGQRKAGAAVTTETEVIWAKALPAGTSAQRAELIALTQALKMAEGKKLNVYTDSRYAFATAHIHGEIYRRRGWLTSEGKEIKNKDEILALLKALFLPKRLSIIHCPGHQKGHSAEARGNRMADQAARKAAITETPDTSTLLIENSSPNSRLIN

SEQ ID NO: 286 - protein, 683 aa, Synthetic construct
TLNIEDEHRLHETSKEPDVSLGSTWLSDFPQAWAETGGMGLAVRQAPLIIPLKATSTPVSIKQYPMSQEARLGIKPHIQRLLDQGILVPCQSPWNTPLLPVKKPGTNDYRPVQDLREVNKRVEDIHPTVPNPYNLLSGLPPSHQWYTVLDLKDAFFCLRLHPTSQPLFAFEWRDPEMGISGQLTWTRLPQGFKNSPTLFNEALHRDLADFRIQHPDLILLQYLDDLLLAATSELDCQQGTRALLQTLGNLGYRASAKKAQICQKQVKYLGYLLKEGQRWLTEARKETVMGQPTPKTPRQLREFLGKAGFCRLFIPGFAEMAAPLYPLTKPGTLFNWGPDQQKAYQEIKQALLTAPALGLPDLTKPFELFVDEKQGYAKGVLTQKLGPWRRPVAYLSKKLDPVAAGWPPCLRMVAAIAVLTKDAGKLTMGQPLVILAPHAVEALVKQPPDRWLSNARMTHYQALLLDTDRVQFGPVVALNPATLLPLPEEGLQHNCLDILAEAHGTRPDLTDQPLPDADHTWYTDGSSLLQEGQRKAGAAVTTETEVIWAKALPAGTSAQRAELIALTQALKMAEGKKLNVYTDSRYAFATAHIHGEIYRRRGWLTSEGKEIKNKDEILALLKALFLPKRLSIIHCPGHQKGHSAEARGNRMADQAARKAAITETPDTSTLLIENSSPNSRLIN

SEQ ID NO: 287 - protein, 683 aa, Synthetic construct
TLNIEDEHRLHETSKEPDVSLGSTWLSDFPQAWAETGGMGLAVRQAPLIIPLKATSTPVSIKQYPMSQEARLGIKPHIQRLLDQGILVPCQSPWNTPLLPVKKPGTNDYRPVQDLREVNKRVEDIHPTVPNPYNLLSGLPPSHQWYTVLDLKDAFFCLRLHPTSQPLFAFEWRDPEMGISGQLTWTRLPQGFKNSPTLFNEALHRDLADFRIQHPDLILLQYFDDLLLAATSELDCQQGTRALLQTLGNLGYRASAKKAQICQKQVKYLGYLLKEGQRWLTEARKETVMGQPTPKTPRQLREFLGKAGFCRLFIPGFAEMAAPLYPLTKPGTLFNWGPDQQKAYQEIKQALLTAPALGLPDLTKPFELFVDEKQGYAKGVLTQKLGPWRRPVAYLSKKLDPVAAGWPPCLRMVAAIAVLTKDAGKLTMGQPLVILAPHAVEALVKQPPDRWLSNARMTHYQALLLDTDRVQFGPVVALNPATLLPLPEEGLQHNCLDILAEAHGTRPDLTDQPLPDADHTWYTDGSSLLQEGQRKAGAAVTTETEVIWAKALPAGTSAQRAELIALTQALKMAEGKKLNVYTDSRYAFATAHIHGEIYRRRGWLTSEGKEIKNKDEILALLKALFLPKRLSIIHCPGHQKGHSAEARGNRMADQAARKAAITETPDTSTLLIENSSPNSRLIN

SEQ ID NO: 288 - protein, 683 aa, Synthetic construct
TLNIEDEHRLHETSKEPDVSLGSTWLSDFPQAWAETGGMGLAVRQAPLIIPLKATSTPVSIKQYPMSQEARLGIKPHIQRLLDQGILVPCQSPWNTPLLPVKKPGTNDYRPVQDLREVNKRVEDIHPTVPNPYNLLSGLPPSHQWYTVLDLKDAFFCLRLHPTSQPLFAFEWRDPEMGISGQLTWTRLPQGFKNSPTLFNEALHRDLADFRIQHPDLILLQYYDDLLLAATSELDCQQGTRALLQTLGNLGYRASAKKAQICQKQVKYLGYLLKEGQRWLTEARKETVMGQPTPKTPRQLREFLGKAGFCRLFIPGFAEMAAPLYPLTKPGTLFNWGPDQQKAYQEIKQALLTAPALGLPDLTKPFELFVDEKQGYAKGVLTQKLGPWRRPVAYLSKKLDPVAAGWPPCLRMVAAIAVLTKDAGKLTMGQPLVILAPHAVEALVKQPPDRWLSNARMTHYQALLLDTDRVQFGPVVALNPATLLPLPEEGLQHNCLDILAEAHGTRPDLTDQPLPDADHTWYTDGSSLLQEGQRKAGAAVTTETEVIWAKALPAGTSAQRAELIALTQALKMAEGKKLNVYTDSRYAFATAHIHGEIYRRRGWLTSEGKEIKNKDEILALLKALFLPKRLSIIHCPGHQKGHSAEARGNRMADQAARKAAITETPDTSTLLIENSSPNSRLIN

SEQ ID NO: 289 - protein, 683 aa, Synthetic construct
TLNIEDEHRLHETSKEPDVSLGSTWLSDFPQAWAETGGMGLAVRQAPLIIPLKATSTPVSIKQYPMSQEARLGIKPHIQRLLDQGILVPCQSPWNTPLLPVKKPGTNDYRPVQDLREVNKRVEDIHPTVPNPYNLLSGLPPSHQWYTVLDLKDAFFCLRLHPTSQPLFAFEWRDPEMGISGQLTWTRLPQGFKNSPTLFNEALHRDLADFRIQHPDLILLQYADDLLLAATSELDCQQGTRALLQTLGNLGYRASAKKAQICQKQVKYLGYLLKEGQRWLTEARKETVMGQPTPKTPRQLREFLGKAGFCRLFIPGFAEMAAPLYPLTKPGTLFNWGPDQQKAYQEIKQALLTAPALGLPDLTKPFELFVDEKQGYAKGVLTQKLGPWRRPVAYLSKKLDPVAAGWPPCLRMVAAIAVLTKDAGKLTMGQPLVILAPHAVEALVKQPPDRWLSNARMTHYQALLLDTDRVQFGPVVALNPATLLPLPEEGLQHNCLDILAEAHGTRPDLTDQPLPDADHTWYTDGSSLLQEGQRKAGAAVTTETEVIWAKALPAGTSAQRAELIALTQALKMAEGKKLNVYTDSRYAFATAHIHGEIYRRRGWLTSEGKEIKNKDEILALLKALFLPKRLSIIHCPGHQKGHSAEARGNRMADQAARKAAITETPDTSTLLIENSSPNSRLIN

SEQ ID NO: 290 - protein, 683 aa, Synthetic construct
TLNIEDEHRLHETSKEPDVSLGSTWLSDFPQAWAETGGMGLAVRQAPLIIPLKATSTPVSIKQYPMSQEARLGIKPHIQRLLDQGILVPCQSPWNTPLLPVKKPGTNDYRPVQDLREVNKRVEDIHPTVPNPYNLLSGLPPSHQWYTVLDLKDAFFCLRLHPTSQPLFAFEWRDPEMGISGQLTWTRLPQGFKNSPTLFNEALHRDLADFRIQHPDLILLQYVDDLLLAATSELDCQQGTRALLQTLGNLGYRASAKKAQICQKQVKYLGYLLKEGQRWLTEARKEHVMGQPTPKTPRQLREFLGKAGFCRLFIPGFAEMAAPLYPLTKPGTLFNWGPDQQKAYQEIKQALLTAPALGLPDLTKPFELFVDEKQGYAKGVLTQKLGPWRRPVAYLSKKLDPVAAGWPPCLRMVAAIAVLTKDAGKLTMGQPLVILAPHAVEALVKQPPDRWLSNARMTHYQALLLDTDRVQFGPVVALNPATLLPLPEEGLQHNCLDILAEAHGTRPDLTDQPLPDADHTWYTDGSSLLQEGQRKAGAAVTTETEVIWAKALPAGTSAQRAELIALTQALKMAEGKKLNVYTDSRYAFATAHIHGEIYRRRGWLTSEGKEIKNKDEILALLKALFLPKRLSIIHCPGHQKGHSAEARGNRMADQAARKAAITETPDTSTLLIENSSPNSRLIN

SEQ ID NO: 291 - protein, 683 aa, Synthetic construct
TLNIEDEHRLHETSKEPDVSLGSTWLSDFPQAWAETGGMGLAVRQAPLIIPLKATSTPVSIKQYPMSQEARLGIKPHIQRLLDQGILVPCQSPWNTPLLPVKKPGTNDYRPVQDLREVNKRVEDIHPTVPNPYNLLSGLPPSHQWYTVLDLKDAFFCLRLHPTSQPLFAFEWRDPEMGISGQLTWTRLPQGFKNSPTLFNEALHRDLADFRIQHPDLILLQYVDDLLLAATSELDCQQGTRALLQTLGNLGYRASAKKAQICQKQVKYLGYLLKEGQRWLTEARKENVMGQPTPKTPRQLREFLGKAGFCRLFIPGFAEMAAPLYPLTKPGTLFNWGPDQQKAYQEIKQALLTAPALGLPDLTKPFELFVDEKQGYAKGVLTQKLGPWRRPVAYLSKKLDPVAAGWPPCLRMVAAIAVLTKDAGKLTMGQPLVILAPHAVEALVKQPPDRWLSNARMTHYQALLLDTDRVQFGPVVALNPATLLPLPEEGLQHNCLDILAEAHGTRPDLTDQPLPDADHTWYTDGSSLLQEGQRKAGAAVTTETEVIWAKALPAGTSAQRAELIALTQALKMAEGKKLNVYTDSRYAFATAHIHGEIYRRRGWLTSEGKEIKNKDEILALLKALFLPKRLSIIHCPGHQKGHSAEARGNRMADQAARKAAITETPDTSTLLIENSSPNSRLIN

SEQ ID NO: 292 - protein, 683 aa, Synthetic construct
TLNIEDEHRLHETSKEPDVSLGSTWLSDFPQAWAETGGMGLAVRQAPLIIPLKATSTPVSIKQYPMSQEARLGIKPHIQRLLDQGILVPCQSPWNTPLLPVKKPGTNDYRPVQDLREVNKRVEDIHPTVPNPYNLLSGLPPSHQWYTVLDLKDAFFCLRLHPTSQPLFAFEWRDPEMGISGQLTWTRLPQGFKNSPTLFNEALHRDLADFRIQHPDLILLQYVDDLLLAATSELDCQQGTRALLQTLGNLGYRASAKKAQICQKQVKYLGYLLKEGQRWLTEARKEIVMGQPTPKTPRQLREFLGKAGFCRLFIPGFAEMAAPLYPLTKPGTLFNWGPDQQKAYQEIKQALLTAPALGLPDLTKPFELFVDEKQGYAKGVLTQKLGPWRRPVAYLSKKLDPVAAGWPPCLRMVAAIAVLTKDAGKLTMGQPLVILAPHAVEALVKQPPDRWLSNARMTHYQALLLDTDRVQFGPVVALNPATLLPLPEEGLQHNCLDILAEAHGTRPDLTDQPLPDADHTWYTDGSSLLQEGQRKAGAAVTTETEVIWAKALPAGTSAQRAELIALTQALKMAEGKKLNVYTDSRYAFATAHIHGEIYRRRGWLTSEGKEIKNKDEILALLKALFLPKRLSIIHCPGHQKGHSAEARGNRMADQAARKAAITETPDTSTLLIENSSPNSRLIN

SEQ ID NO: 293 - protein, 683 aa, Synthetic construct
TLNIEDEHRLHETSKEPDVSLGSTWLSDFPQAWAETGGMGLAVRQAPLIIPLKATSTPVSIKQYPMSQEARLGIKPHIQRLLDQGILVPCQSPWNTPLLPVKKPGTNDYRPVQDLREVNKRVEDIHPTVPNPYNLLSGLPPSHQWYTVLDLKDAFFCLRLHPTSQPLFAFEWRDPEMGISGQLTWTRLPQGFKNSPTLFNEALHRDLADFRIQHPDLILLQYVDDLLLAATSELDCQQGTRALLQTLGNLGYRASAKKAQICQKQVKYLGYLLKEGQRWLTEARKEAVMGQPTPKTPRQLREFLGKAGFCRLFIPGFAEMAAPLYPLTKPGTLFNWGPDQQKAYQEIKQALLTAPALGLPDLTKPFELFVDEKQGYAKGVLTQKLGPWRRPVAYLSKKLDPVAAGWPPCLRMVAAIAVLTKDAGKLTMGQPLVILAPHAVEALVKQPPDRWLSNARMTHYQALLLDTDRVQFGPVVALNPATLLPLPEEGLQHNCLDILAEAHGTRPDLTDQPLPDADHTWYTDGSSLLQEGQRKAGAAVTTETEVIWAKALPAGTSAQRAELIALTQALKMAEGKKLNVYTDSRYAFATAHIHGEIYRRRGWLTSEGKEIKNKDEILALLKALFLPKRLSIIHCPGHQKGHSAEARGNRMADQAARKAAITETPDTSTLLIENSSPNSRLIN

SEQ ID NO: 294 - protein, 683 aa, Synthetic construct
TLNIEDEHRLHETSKEPDVSLGSTWLSDFPQAWAETGGMGLAVRQAPLIIPLKATSTPVSIKQYPMSQEARLGIKPHIQRLLDQGILVPCQSPWNTPLLPVKKPGTNDYRPVQDLREVNKRVEDIHPTVPNPYNLLSGLPPSHQWYTVLDLKDAFFCLRLHPTSQPLFAFEWRDPEMGISGQLTWTRLPQGFKNSPTLFNEALHRDLADFRIQHPDLILLQYVDDLLLAATSELDCQQGTRALLQTLGNLGYRASAKKAQICQKQVKYLGYLLKEGQRWLTEARKEGVMGQPTPKTPRQLREFLGKAGFCRLFIPGFAEMAAPLYPLTKPGTLFNWGPDQQKAYQEIKQALLTAPALGLPDLTKPFELFVDEKQGYAKGVLTQKLGPWRRPVAYLSKKLDPVAAGWPPCLRMVAAIAVLTKDAGKLTMGQPLVILAPHAVEALVKQPPDRWLSNARMTHYQALLLDTDRVQFGPVVALNPATLLPLPEEGLQHNCLDILAEAHGTRPDLTDQPLPDADHTWYTDGSSLLQEGQRKAGAAVTTETEVIWAKALPAGTSAQRAELIALTQALKMAEGKKLNVYTDSRYAFATAHIHGEIYRRRGWLTSEGKEIKNKDEILALLKALFLPKRLSIIHCPGHQKGHSAEARGNRMADQAARKAAITETPDTSTLLIENSSPNSRLIN

SEQ ID NO: 295 - protein, 683 aa, Synthetic construct
TLNIEDEHRLHETSKEPDVSLGSTWLSDFPQAWAETGGMGLAVRQAPLIIPLKATSTPVSIKQYPMSQEARLGIKPHIQRLLDQGILVPCQSPWNTPLLPVKKPGTNDYRPVQDLREVNKRVEDIHPTVPNPYNLLSGLPPSHQWYTVLDLKDAFFCLRLHPTSQPLFAFEWRDPEMGISGQLTWTRLPQGFKNSPTLFNEALHRDLADFRIQHPDLILLQYVDDLLLAATSELDCQQGTRALLQTLGNLGYRASAKKAQICQKQVKYLGYLLKEGQRWLTEARKEDVMGQPTPKTPRQLREFLGKAGFCRLFIPGFAEMAAPLYPLTKPGTLFNWGPDQQKAYQEIKQALLTAPALGLPDLTKPFELFVDEKQGYAKGVLTQKLGPWRRPVAYLSKKLDPVAAGWPPCLRMVAAIAVLTKDAGKLTMGQPLVILAPHAVEALVKQPPDRWLSNARMTHYQALLLDTDRVQFGPVVALNPATLLPLPEEGLQHNCLDILAEAHGTRPDLTDQPLPDADHTWYTDGSSLLQEGQRKAGAAVTTETEVIWAKALPAGTSAQRAELIALTQALKMAEGKKLNVYTDSRYAFATAHIHGEIYRRRGWLTSEGKEIKNKDEILALLKALFLPKRLSIIHCPGHQKGHSAEARGNRMADQAARKAAITETPDTSTLLIENSSPNSRLIN

SEQ ID NO: 296 - protein, 683 aa, Synthetic construct
TLNIEDEHRLHETSKEPDVSLGSTWLSDFPQAWAETGGMGLAVRQAPLIIPLKATSTPVSIKQYPMSQEARLGIKPHIQRLLDQGILVPCQSPWNTPLLPVKKPGTNDYRPVQDLREVNKRVEDIHPTVPNPYNLLSGLPPSHQWYTVLDLKDAFFCLRLHPTSQPLFAFEWRDPEMGISGQLTWTRLPQGFKNSPTLFNEALHRDLADFRIQHPDLILLQYVDDLLLAATSELDCQQGTRALLQTLGNLGYRASAKKAQICQKQVKYLGYLLKEGQRWLTEARKETVMGQPTPKTPRQLREFLGKAGACRLFIPGFAEMAAPLYPLTKPGTLFNWGPDQQKAYQEIKQALLTAPALGLPDLTKPFELFVDEKQGYAKGVLTQKLGPWRRPVAYLSKKLDPVAAGWPPCLRMVAAIAVLTKDAGKLTMGQPLVILAPHAVEALVKQPPDRWLSNARMTHYQALLLDTDRVQFGPVVALNPATLLPLPEEGLQHNCLDILAEAHGTRPDLTDQPLPDADHTWYTDGSSLLQEGQRKAGAAVTTETEVIWAKALPAGTSAQRAELIALTQALKMAEGKKLNVYTDSRYAFATAHIHGEIYRRRGWLTSEGKEIKNKDEILALLKALFLPKRLSIIHCPGHQKGHSAEARGNRMADQAARKAAITETPDTSTLLIENSSPNSRLIN

SEQ ID NO: 297 - protein, 683 aa, Synthetic construct
TLNIEDEHRLHETSKEPDVSLGSTWLSDFPQAWAETGGMGLAVRQAPLIIPLKATSTPVSIKQYPMSQEARLGIKPHIQRLLDQGILVPCQSPWNTPLLPVKKPGTNDYRPVQDLREVNKRVEDIHPTVPNPYNLLSGLPPSHQWYTVLDLKDAFFCLRLHPTSQPLFAFEWRDPEMGISGQLTWTRLPQGFKNSPTLFNEALHRDLADFRIQHPDLILLQYVDDLLLAATSELDCQQGTRALLQTLGNLGYRASAKKAQICQKQVKYLGYLLKEGQRWLTEARKETVMGQPTPKTPRQLREFLGKAGNCRLFIPGFAEMAAPLYPLTKPGTLFNWGPDQQKAYQEIKQALLTAPALGLPDLTKPFELFVDEKQGYAKGVLTQKLGPWRRPVAYLSKKLDPVAAGWPPCLRMVAAIAVLTKDAGKLTMGQPLVILAPHAVEALVKQPPDRWLSNARMTHYQALLLDTDRVQFGPVVALNPATLLPLPEEGLQHNCLDILAEAHGTRPDLTDQPLPDADHTWYTDGSSLLQEGQRKAGAAVTTETEVIWAKALPAGTSAQRAELIALTQALKMAEGKKLNVYTDSRYAFATAHIHGEIYRRRGWLTSEGKEIKNKDEILALLKALFLPKRLSIIHCPGHQKGHSAEARGNRMADQAARKAAITETPDTSTLLIENSSPNSRLIN

SEQ ID NO: 298 - protein, 683 aa, Synthetic construct
TLNIEDEHRLHETSKEPDVSLGSTWLSDFPQAWAETGGMGLAVRQAPLIIPLKATSTPVSIKQYPMSQEARLGIKPHIQRLLDQGILVPCQSPWNTPLLPVKKPGTNDYRPVQDLREVNKRVEDIHPTVPNPYNLLSGLPPSHQWYTVLDLKDAFFCLRLHPTSQPLFAFEWRDPEMGISGQLTWTRLPQGFKNSPTLFNEALHRDLADFRIQHPDLILLQYVDDLLLAATSELDCQQGTRALLQTLGNLGYRASAKKAQICQKQVKYLGYLLKEGQRWLTEARKETVMGQPTPKTPRQLREFLGKAGSCRLFIPGFAEMAAPLYPLTKPGTLFNWGPDQQKAYQEIKQALLTAPALGLPDLTKPFELFVDEKQGYAKGVLTQKLGPWRRPVAYLSKKLDPVAAGWPPCLRMVAAIAVLTKDAGKLTMGQPLVILAPHAVEALVKQPPDRWLSNARMTHYQALLLDTDRVQFGPVVALNPATLLPLPEEGLQHNCLDILAEAHGTRPDLTDQPLPDADHTWYTDGSSLLQEGQRKAGAAVTTETEVIWAKALPAGTSAQRAELIALTQALKMAEGKKLNVYTDSRYAFATAHIHGEIYRRRGWLTSEGKEIKNKDEILALLKALFLPKRLSIIHCPGHQKGHSAEARGNRMADQAARKAAITETPDTSTLLIENSSPNSRLIN

SEQ ID NO: 299 - protein, 683 aa, Synthetic construct
TLNIEDEHRLHETSKEPDVSLGSTWLSDFPQAWAETGGMGLAVRQAPLIIPLKATSTPVSIKQYPMSQEARLGIKPHIQRLLDQGILVPCQSPWNTPLLPVKKPGTNDYRPVQDLREVNKRVEDIHPTVPNPYNLLSGLPPSHQWYTVLDLKDAFFCLRLHPTSQPLFAFEWRDPEMGISGQLTWTRLPQGFKNSPTLFNEALHRDLADFRIQHPDLILLQYVDDLLLAATSELDCQQGTRALLQTLGNLGYRASAKKAQICQKQVKYLGYLLKEGQRWLTEARKETVMGQPTPKTPRQLREFLGKAGCCRLFIPGFAEMAAPLYPLTKPGTLFNWGPDQQKAYQEIKQALLTAPALGLPDLTKPFELFVDEKQGYAKGVLTQKLGPWRRPVAYLSKKLDPVAAGWPPCLRMVAAIAVLTKDAGKLTMGQPLVILAPHAVEALVKQPPDRWLSNARMTHYQALLLDTDRVQFGPVVALNPATLLPLPEEGLQHNCLDILAEAHGTRPDLTDQPLPDADHTWYTDGSSLLQEGQRKAGAAVTTETEVIWAKALPAGTSAQRAELIALTQALKMAEGKKLNVYTDSRYAFATAHIHGEIYRRRGWLTSEGKEIKNKDEILALLKALFLPKRLSIIHCPGHQKGHSAEARGNRMADQAARKAAITETPDTSTLLIENSSPNSRLIN

SEQ ID NO: 300 - protein, 683 aa, Synthetic construct
TLNIEDEHRLHETSKEPDVSLGSTWLSDFPQAWAETGGMGLAVRQAPLIIPLKATSTPVSIKQYPMSQEARLGIKPHIQRLLDQGILVPCQSPWNTPLLPVKKPGTNDYRPVQDLREVNKRVEDIHPTVPNPYNLLSGLPPSHQWYTVLDLKDAFFCLRLHPTSQPLFAFEWRDPEMGISGQLTWTRLPQGFKNSPTLFNEALHRDLADFRIQHPDLILLQYVDDLLLAATSELDCQQGTRALLQTLGNLGYRASAKKAQICQKQVKYLGYLLKEGQRWLTEARKETVMGQPTPKTPRQLREFLGKAGGCRLFIPGFAEMAAPLYPLTKPGTLFNWGPDQQKAYQEIKQALLTAPALGLPDLTKPFELFVDEKQGYAKGVLTQKLGPWRRPVAYLSKKLDPVAAGWPPCLRMVAAIAVLTKDAGKLTMGQPLVILAPHAVEALVKQPPDRWLSNARMTHYQALLLDTDRVQFGPVVALNPATLLPLPEEGLQHNCLDILAEAHGTRPDLTDQPLPDADHTWYTDGSSLLQEGQRKAGAAVTTETEVIWAKALPAGTSAQRAELIALTQALKMAEGKKLNVYTDSRYAFATAHIHGEIYRRRGWLTSEGKEIKNKDEILALLKALFLPKRLSIIHCPGHQKGHSAEARGNRMADQAARKAAITETPDTSTLLIENSSPNSRLIN

SEQ ID NO: 301 - protein, 683 aa, Synthetic construct
TLNIEDEHRLHETSKEPDVSLGSTWLSDFPQAWAETGGMGLAVRQAPLIIPLKATSTPVSIKQYPMSQEARLGIKPHIQRLLDQGILVPCQSPWNTPLLPVKKPGTNDYRPVQDLREVNKRVEDIHPTVPNPYNLLSGLPPSHQWYTVLDLKDAFFCLRLHPTSQPLFAFEWRDPEMGISGQLTWTRLPQGFKNSPTLFNEALHRDLADFRIQHPDLILLQYVDDLLLAATSELDCQQGTRALLQTLGNLGYRASAKKAQICQKQVKYLGYLLKEGQRWLTEARKETVMGQPTPKTPRQLREFLGKAGFCRLFIPGFAEMAAPLYPLTKPGTLFNWGPDQQKAYQEIKQALLTAPALGLPDLTKPFELFVDEKQGYAKGVLTQKLGPWRRPVAYLSKKLDPVAAGWPPCLRMVAAIAVLTKDAGKLTMGQPLVILAPHAVEALVKQPPDRWLSNARMTHYQALLLDTDRVQFGPVVALNPATLLPLPEEGLQHNCLDILAEAHGTRPDLTDQPLPDADHTWYTNGSSLLQEGQRKAGAAVTTETEVIWAKALPAGTSAQRAELIALTQALKMAEGKKLNVYTDSRYAFATAHIHGEIYRRRGWLTSEGKEIKNKDEILALLKALFLPKRLSIIHCPGHQKGHSAEARGNRMADQAARKAAITETPDTSTLLIENSSPNSRLIN

SEQ ID NO: 302 - protein, 683 aa, Synthetic construct
TLNIEDEHRLHETSKEPDVSLGSTWLSDFPQAWAETGGMGLAVRQAPLIIPLKATSTPVSIKQYPNSQEARLGIKPHIQRLLDQGILVPCQSPWNTPLLPVKKPGTNDYRPVQDLREVNKRVEDIHPTVPNPYNLLSGGPPSHQWYTVLDLKDAFFCLRLHPTSQPLFAFEWRDPEMGISGQLTWTRLPQGFKNSPTLFNEALHRDLADFRIQHPDLILLQYLDDLLLAATSELDCQQGTRALLQTLGNLGYRASAKKAQICQKQVKYLGYLLKEGQRWLTEARKETVMGQPTPKTPRQLREFLGKAGFCRLFIPGFAEMAAPLYPLTKPGTLFNWGPDQQKAYQEIKQALLTAPALGLPDLTKPFELFVDEKQGYAKGVLTQKLGPWRRPVAYLSKKLDPVAAGWPPCLRMVAAIAVLTKDAGKLTMGQPLVILAPHAVEALVKQPPDRWLSNARMTHYQALLLDTDRVQFGPVVALNPATLLPLPEEGLQHNCLDILAEAHGTRPDLTDQPLPDADHTWYTDGSSLLQEGQRKAGAAVTTETEVIWAKALPAGTSAQRAELIALTQALKMAEGKKLNVYTDSRYAFATAHIHGEIYRRRGWLTSEGKEIKNKDEILALLKALFLPKRLSIIHCPGHQKGHSAEARGNRMADQAARKAAITETPDTSTLLIENSSPNSRLIN

SEQ ID NO: 303 - protein, 683 aa, Synthetic construct
TLNIEDEHRLHETSKEPDVSLGSTWLSDFPQAWAETGGMGLAVRQAPLIIPLKATSTPVSIKQYPMSQEARLGIKPHIQRLLDQGILVPCQSPWNTPLLPVKKPGTNDYRPVQDLREVNKRVEDIHPTVPNPYNLLSGGPPSHQWYTVLDLKDAFFCLRLTPTSQPLFAFEWRDPEMGISGQLTWTRLPQGFKNSPTLFNEALHRDLADFRIQHPDLILLQYLDDLLLAATSELDCQQGTRALLQTLGNLGYRASAKKAQICQKQVKYLGYLLKEGQRWLTEARKETVMGQPTPKTPRQLREFLGKAGFCRLFIPGFAEMAAPLYPLTKPGTLFNWGPDQQKAYQEIKQALLTAPALGLPDLTKPFELFVDEKQGYAKGVLTQKLGPWRRPVAYLSKKLDPVAAGWPPCLRMVAAIAVLTKDAGKLTMGQPLVILAPHAVEALVKQPPDRWLSNARMTHYQALLLDTDRVQFGPVVALNPATLLPLPEEGLQHNCLDILAEAHGTRPDLTDQPLPDADHTWYTDGSSLLQEGQRKAGAAVTTETEVIWAKALPAGTSAQRAELIALTQALKMAEGKKLNVYTDSRYAFATAHIHGEIYRRRGWLTSEGKEIKNKDEILALLKALFLPKRLSIIHCPGHQKGHSAEARGNRMADQAARKAAITETPDTSTLLIENSSPNSRLIN

SEQ ID NO: 304 - protein, 683 aa, Synthetic construct
TLNIEDEHRLHETSKEPDVSLGSTWLSDFPQAWAETGGMGLAVRQAPLIIPLKATSTPVSIKQYPMSQEARLGIKPHIQRLLDQGILVPCQSPWNTPLLPVKKPGTNDYRPVQDLREVNKRVEDIHPTVPNPYNLLSGGPPSHQWYTVLDLKDAFFCLRLHPTSQPLFAFYWRDPEMGISGQLTWTRLPQGFKNSPTLFNEALHRDLADFRIQHPDLILLQYLDDLLLAATSELDCQQGTRALLQTLGNLGYRASAKKAQICQKQVKYLGYLLKEGQRWLTEARKETVMGQPTPKTPRQLREFLGKAGFCRLFIPGFAEMAAPLYPLTKPGTLFNWGPDQQKAYQEIKQALLTAPALGLPDLTKPFELFVDEKQGYAKGVLTQKLGPWRRPVAYLSKKLDPVAAGWPPCLRMVAAIAVLTKDAGKLTMGQPLVILAPHAVEALVKQPPDRWLSNARMTHYQALLLDTDRVQFGPVVALNPATLLPLPEEGLQHNCLDILAEAHGTRPDLTDQPLPDADHTWYTDGSSLLQEGQRKAGAAVTTETEVIWAKALPAGTSAQRAELIALTQALKMAEGKKLNVYTDSRYAFATAHIHGEIYRRRGWLTSEGKEIKNKDEILALLKALFLPKRLSIIHCPGHQKGHSAEARGNRMADQAARKAAITETPDTSTLLIENSSPNSRLIN

SEQ ID NO: 305 - protein, 683 aa, Synthetic construct
TLNIEDEHRLHETSKEPDVSLGSTWLSDFPQAWAETGGMGLAVRQAPLIIPLKATSTPVSIKQYPNSQEARLGIKPHIQRLLDQGILVPCQSPWNTPLLPVKKPGTNDYRPVQDLREVNKRVEDIHPTVPNPYNLLSGLPPSHQWYTVLDLKDAFFCLRLTPTSQPLFAFEWRDPEMGISGQLTWTRLPQGFKNSPTLFNEALHRDLADFRIQHPDLILLQYVDDLLLAATSELDCQQGTRALLQTLGNLGYRASAKKAQICQKQVKYLGYLLKEGQRWLTEARKETVMGQPTPKTPRQLREFLGKAGFCRLFIPGFAEMAAPLYPLTKPGTLFNWGPDQQKAYQEIKQALLTAPALGLPDLTKPFELFVDEKQGYAKGVLTQKLGPWRRPVAYLSKKLDPVAAGWPPCLRMVAAIAVLTKDAGKLTMGQPLVILAPHAVEALVKQPPDRWLSNARMTHYQALLLDTDRVQFGPVVALNPATLLPLPEEGLQHNCLDILAEAHGTRPDLTDQPLPDADHTWYTDGSSLLQEGQRKAGAAVTTETEVIWAKALPAGTSAQRAELIALTQALKMAEGKKLNVYTDSRYAFATAHIHGEIYRRRGWLTSEGKEIKNKDEILALLKALFLPKRLSIIHCPGHQKGHSAEARGNRMADQAARKAAITETPDTSTLLIENSSPNSRLIN

SEQ ID NO: 306 - protein, 683 aa, Synthetic construct
TLNIEDEHRLHETSKEPDVSLGSTWLSDFPQAWAETGGMGLAVRQAPLIIPLKATSTPVSIKQYPNSQEARLGIKPHIQRLLDQGILVPCQSPWNTPLLPVKKPGTNDYRPVQDLREVNKRVEDIHPTVPNPYNLLSGLPPSHQWYTVLDLKDAFFCLRLHPTSQPLFAFYWRDPEMGISGQLTWTRLPQGFKNSPTLFNEALHRDLADFRIQHPDLILLQYVDDLLLAATSELDCQQGTRALLQTLGNLGYRASAKKAQICQKQVKYLGYLLKEGQRWLTEARKETVMGQPTPKTPRQLREFLGKAGFCRLFIPGFAEMAAPLYPLTKPGTLFNWGPDQQKAYQEIKQALLTAPALGLPDLTKPFELFVDEKQGYAKGVLTQKLGPWRRPVAYLSKKLDPVAAGWPPCLRMVAAIAVLTKDAGKLTMGQPLVILAPHAVEALVKQPPDRWLSNARMTHYQALLLDTDRVQFGPVVALNPATLLPLPEEGLQHNCLDILAEAHGTRPDLTDQPLPDADHTWYTDGSSLLQEGQRKAGAAVTTETEVIWAKALPAGTSAQRAELIALTQALKMAEGKKLNVYTDSRYAFATAHIHGEIYRRRGWLTSEGKEIKNKDEILALLKALFLPKRLSIIHCPGHQKGHSAEARGNRMADQAARKAAITETPDTSTLLIENSSPNSRLIN

SEQ ID NO: 307 - protein, 683 aa, Synthetic construct
TLNIEDEHRLHETSKEPDVSLGSTWLSDFPQAWAETGGMGLAVRQAPLIIPLKATSTPVSIKQYPMSQEARLGIKPHIQRLLDQGILVPCQSPWNTPLLPVKKPGTNDYRPVQDLREVNKRVEDIHPTVPNPYNLLSGLPPSHQWYTVLDLKDAFFCLRLTPTSQPLFAFYWRDPEMGISGQLTWTRLPQGFKNSPTLFNEALHRDLADFRIQHPDLILLQYVDDLLLAATSELDCQQGTRALLQTLGNLGYRASAKKAQICQKQVKYLGYLLKEGQRWLTEARKETVMGQPTPKTPRQLREFLGKAGFCRLFIPGFAEMAAPLYPLTKPGTLFNWGPDQQKAYQEIKQALLTAPALGLPDLTKPFELFVDEKQGYAKGVLTQKLGPWRRPVAYLSKKLDPVAAGWPPCLRMVAAIAVLTKDAGKLTMGQPLVILAPHAVEALVKQPPDRWLSNARMTHYQALLLDTDRVQFGPVVALNPATLLPLPEEGLQHNCLDILAEAHGTRPDLTDQPLPDADHTWYTDGSSLLQEGQRKAGAAVTTETEVIWAKALPAGTSAQRAELIALTQALKMAEGKKLNVYTDSRYAFATAHIHGEIYRRRGWLTSEGKEIKNKDEILALLKALFLPKRLSIIHCPGHQKGHSAEARGNRMADQAARKAAITETPDTSTLLIENSSPNSRLIN

SEQ ID NO: 308 - protein, 683 aa, Synthetic construct
TLNIEDEHRLHETSKEPDVSLGSTWLSDFPQAWAETGGMGLAVRQAPLIIPLKATSTPVSIKQYPNSQEARLGIKPHIQRLLDQGILVPCQSPWNTPLLPVKKPGTNDYRPVQDLREVNKRVEDIHPTVPNPYNLLSGLPPSHQWYTVLDLKDAFFCLRLTPTSQPLFAFYWRDPEMGISGQLTWTRLPQGFKNSPTLFNEALHRDLADFRIQHPDLILLQYVDDLLLAATSELDCQQGTRALLQTLGNLGYRASAKKAQICQKQVKYLGYLLKEGQRWLTEARKETVMGQPTPKTPRQLREFLGKAGFCRLFIPGFAEMAAPLYPLTKPGTLFNWGPDQQKAYQEIKQALLTAPALGLPDLTKPFELFVDEKQGYAKGVLTQKLGPWRRPVAYLSKKLDPVAAGWPPCLRMVAAIAVLTKDAGKLTMGQPLVILAPHAVEALVKQPPDRWLSNARMTHYQALLLDTDRVQFGPVVALNPATLLPLPEEGLQHNCLDILAEAHGTRPDLTDQPLPDADHTWYTDGSSLLQEGQRKAGAAVTTETEVIWAKALPAGTSAQRAELIALTQALKMAEGKKLNVYTDSRYAFATAHIHGEIYRRRGWLTSEGKEIKNKDEILALLKALFLPKRLSIIHCPGHQKGHSAEARGNRMADQAARKAAITETPDTSTLLIENSSPNSRLIN

SEQ ID NO: 309 - protein, 683 aa, Synthetic construct
TLNIEDEHRLHETSKEPDVSLGSTWLSDFPQAWAETGGMGLAVRQAPLIIPLKATSTPVSIKQYPMSQEARLGIKPHIQRLLDQGILVPCQSPWNTPLLPVKKPGTNDYRPVQDLREVNKRVEDIHPTVPNPYNLLSGGPPSHQWYTVLDLKDAFFCLRLHPTSQPLFAFEWRDPEMGISGQLTWTRLPQGFKNSPTLFNEALHRDLADFRIQHPDLILLQYLDDLLLAATSELDCQQGTRALLQTLGNLGYRASAKKAQICQKQVKYLGYLLKEGQRWLTEARKETVMGQPTPKTPRQLREFLGKAGFCRLFIPGFAEMAAPLYPLTKPGTLFNWGPDQQKAYQEIKQALLTAPALGLPDLTKPFELFVDEKQGYAKGVLTQKLGPWRRPVAYLSKKLDPVAAGWPPCLRMVAAIAVLTKDAGKLTMGQPLVILAPHAVEALVKQPPDRWLSNARMTHYQALLLDTDRVQFGPVVALNPATLLPLPEEGLQHNCLDILAEAHGTRPDLTDQPLPDADHTWYTDGSSLLQEGQRKAGAAVTTETEVIWAKALPAGTSAQRAELIALTQALKMAEGKKLNVYTDSRYAFATAHIHGEIYRRRGWLTSEGKEIKNKDEILALLKALFLPKRLSIIHCPGHQKGHSAEARGNRMADQAARKAAITETPDTSTLLIENSSPNSRLIN

SEQ ID NO: 310 - protein, 683 aa, Synthetic construct
TLNIEDEHRLHETSKEPDVSLGSTWLSDFPQAWAETGGMGLAVRQAPLIIPLKATSTPVSIKQYPMSQEARLGIKPHIQRLLDQGILVPCQSPWNTPLLPVKKPGTNDYRPVQDLREVNKRVEDIHPTVPNPYNLLSGGPPSHQWYTVLDLKDAFFCLRLTPTSQPLFAFEWRDPEMGISGQLTWTRLPQGFKNSPTLFNEALHRDLADFRIQHPDLILLQYVDDLLLAATSELDCQQGTRALLQTLGNLGYRASAKKAQICQKQVKYLGYLLKEGQRWLTEARKETVMGQPTPKTPRQLREFLGKAGFCRLFIPGFAEMAAPLYPLTKPGTLFNWGPDQQKAYQEIKQALLTAPALGLPDLTKPFELFVDEKQGYAKGVLTQKLGPWRRPVAYLSKKLDPVAAGWPPCLRMVAAIAVLTKDAGKLTMGQPLVILAPHAVEALVKQPPDRWLSNARMTHYQALLLDTDRVQFGPVVALNPATLLPLPEEGLQHNCLDILAEAHGTRPDLTDQPLPDADHTWYTDGSSLLQEGQRKAGAAVTTETEVIWAKALPAGTSAQRAELIALTQALKMAEGKKLNVYTDSRYAFATAHIHGEIYRRRGWLTSEGKEIKNKDEILALLKALFLPKRLSIIHCPGHQKGHSAEARGNRMADQAARKAAITETPDTSTLLIENSSPNSRLIN

SEQ ID NO: 311 - protein, 683 aa, Synthetic construct
TLNIEDEHRLHETSKEPDVSLGSTWLSDFPQAWAETGGMGLAVRQAPLIIPLKATSTPVSIKQYPMSQEARLGIKPHIQRLLDQGILVPCQSPWNTPLLPVKKPGTNDYRPVQDLREVNKRVEDIHPTVPNPYNLLSGLPPSHQWYTVLDLKDAFFCLRLTPTSQPLFAFEWRDPEMGISGQLTWTRLPQGFKNSPTLFNEALHRDLADFRIQHPDLILLQYLDDLLLAATSELDCQQGTRALLQTLGNLGYRASAKKAQICQKQVKYLGYLLKEGQRWLTEARKETVMGQPTPKTPRQLREFLGKAGFCRLFIPGFAEMAAPLYPLTKPGTLFNWGPDQQKAYQEIKQALLTAPALGLPDLTKPFELFVDEKQGYAKGVLTQKLGPWRRPVAYLSKKLDPVAAGWPPCLRMVAAIAVLTKDAGKLTMGQPLVILAPHAVEALVKQPPDRWLSNARMTHYQALLLDTDRVQFGPVVALNPATLLPLPEEGLQHNCLDILAEAHGTRPDLTDQPLPDADHTWYTDGSSLLQEGQRKAGAAVTTETEVIWAKALPAGTSAQRAELIALTQALKMAEGKKLNVYTDSRYAFATAHIHGEIYRRRGWLTSEGKEIKNKDEILALLKALFLPKRLSIIHCPGHQKGHSAEARGNRMADQAARKAAITETPDTSTLLIENSSPNSRLIN

SEQ ID NO: 312 - protein, 683 aa, Synthetic construct
TLNIEDEHRLHETSKEPDVSLGSTWLSDFPQAWAETGGMGLAVRQAPLIIPLKATSTPVSIKQYPTSQEARLGIKPHIQRLLDQGILVPCQSPWNTPLLPVKKPGTNDYRPVQDLREVNKRVEDIHPTVPNPYNLLSGGPPSHQWYTVLDLKDAFFCLRLTPTSQPLFAFYWRDPEMGISGQLTWTRLPQGFKNSPTLFNEALHRDLADFRIQHPDLILLQYLDDLLLAATSELDCQQGTRALLQTLGNLGYRASAKKAQICQKQVKYLGYLLKEGQRWLTEARKETVMGQPTPKTPRQLREFLGKAGFCRLFIPGFAEMAAPLYPLTKPGTLFNWGPDQQKAYQEIKQALLTAPALGLPDLTKPFELFVDEKQGYAKGVLTQKLGPWRRPVAYLSKKLDPVAAGWPPCLRMVAAIAVLTKDAGKLTMGQPLVILAPHAVEALVKQPPDRWLSNARMTHYQALLLDTDRVQFGPVVALNPATLLPLPEEGLQHNCLDILAEAHGTRPDLTDQPLPDADHTWYTDGSSLLQEGQRKAGAAVTTETEVIWAKALPAGTSAQRAELIALTQALKMAEGKKLNVYTDSRYAFATAHIHGEIYRRRGWLTSEGKEIKNKDEILALLKALFLPKRLSIIHCPGHQKGHSAEARGNRMADQAARKAAITETPDTSTLLIENSSPNSRLIN

SEQ ID NO: 313 - protein, 683 aa, Synthetic construct
TLNIEDEHRLHETSKEPDVSLGSTWLSDFPQAWAETGGMGLAVRQAPLIIPLKATSTPVSIKQYPMSQEARLGIKPHIQRLLDQGILVPCQSPWNTPLLPVKKPGTNDYRPVQDLREVNKRVEDIHPTVPNPYNLLSGGPPSHQWYTVLDLKDAFFCLRLTPTSQPLFAFYWRDPEMGISGQLTWTRLPQGFKNSPTLFNEALHRDLADFRIQHPDLILLQYLDDLLLAATSELDCQQGTRALLQTLGNLGYRASAKKAQICQKQVKYLGYLLKEGQRWLTEARKETVMGQPTPKTPRQLREFLGKAGFCRLFIPGFAEMAAPLYPLTKPGTLFNWGPDQQKAYQEIKQALLTAPALGLPDLTKPFELFVDEKQGYAKGVLTQKLGPWRRPVAYLSKKLDPVAAGWPPCLRMVAAIAVLTKDAGKLTMGQPLVILAPHAVEALVKQPPDRWLSNARMTHYQALLLDTDRVQFGPVVALNPATLLPLPEEGLQHNCLDILAEAHGTRPDLTDQPLPDADHTWYTDGSSLLQEGQRKAGAAVTTETEVIWAKALPAGTSAQRAELIALTQALKMAEGKKLNVYTDSRYAFATAHIHGEIYRRRGWLTSEGKEIKNKDEILALLKALFLPKRLSIIHCPGHQKGHSAEARGNRMADQAARKAAITETPDTSTLLIENSSPNSRLIN

SEQ ID NO: 314 - protein, 683 aa, Synthetic construct
TLNIEDEHRLHETSKEPDVSLGSTWLSDFPQAWAETGGMGLAVRQAPLIIPLKATSTPVSIKQYPMSQEARLGIKPHIQRLLDQGILVPCQSPWNTPLLPVKKPGTNDYRPVQDLREVNKRVEDIHPTVPNPYNLLSGIPPSHQWYTVLDLKDAFFCLRLYPTSQPLFAFEWRDPEMGISGQLTWTRLPQGFKNSPTLFNEALHRDLADFRIQHPDLILLQYLDDLLLAATSELDCQQGTRALLQTLGNLGYRASAKKAQICQKQVKYLGYLLKEGQRWLTEARKETVMGQPTPKTPRQLREFLGKAGFCRLFIPGFAEMAAPLYPLTKPGTLFNWGPDQQKAYQEIKQALLTAPALGLPDLTKPFELFVDEKQGYAKGVLTQKLGPWRRPVAYLSKKLDPVAAGWPPCLRMVAAIAVLTKDAGKLTMGQPLVILAPHAVEALVKQPPDRWLSNARMTHYQALLLDTDRVQFGPVVALNPATLLPLPEEGLQHNCLDILAEAHGTRPDLTDQPLPDADHTWYTDGSSLLQEGQRKAGAAVTTETEVIWAKALPAGTSAQRAELIALTQALKMAEGKKLNVYTDSRYAFATAHIHGEIYRRRGWLTSEGKEIKNKDEILALLKALFLPKRLSIIHCPGHQKGHSAEARGNRMADQAARKAAITETPDTSTLLIENSSPNSRLIN

SEQ ID NO: 315 - protein, 683 aa, Synthetic construct
TLNIEDEHRLHETSKEPDVSLGSTWLSDFPQAWAETGGMGLAVRQAPLIIPLKATSTPVSIKQYPMSQEARLGIKPHIQRLLDQGILVPCQSPWNTPLLPVKKPGTNDYRPVQDLREVNKRVEDIHPTVPNPYNLLSGIPPSHQWYTVLDLKDAFFCLRLYPTSQPLFAFEWRDPEMGISGQLTWTRLPQGFKNSPTLFNEALHRDLADFRIQHPDLILLQYMDDLLLAATSELDCQQGTRALLQTLGNLGYRASAKKAQICQKQVKYLGYLLKEGQRWLTEARKETVMGQPTPKTPRQLREFLGKAGFCRLFIPGFAEMAAPLYPLTKPGTLFNWGPDQQKAYQEIKQALLTAPALGLPDLTKPFELFVDEKQGYAKGVLTQKLGPWRRPVAYLSKKLDPVAAGWPPCLRMVAAIAVLTKDAGKLTMGQPLVILAPHAVEALVKQPPDRWLSNARMTHYQALLLDTDRVQFGPVVALNPATLLPLPEEGLQHNCLDILAEAHGTRPDLTDQPLPDADHTWYTDGSSLLQEGQRKAGAAVTTETEVIWAKALPAGTSAQRAELIALTQALKMAEGKKLNVYTDSRYAFATAHIHGEIYRRRGWLTSEGKEIKNKDEILALLKALFLPKRLSIIHCPGHQKGHSAEARGNRMADQAARKAAITETPDTSTLLIENSSPNSRLIN

SEQ ID NO: 316 - protein, 683 aa, Synthetic construct
TLNIEDEHRLHETSKEPDVSLGSTWLSDFPQAWAETGGMGLAVRQAPLIIPLKATSTPVSIKQYPMSQEARLGIKPHIQRLLDQGILVPCQSPWNTPLLPVKKPGTNDYRPVQDLREVNKRVEDIHPTVPNPYNLLSGIPPSHQWYTVLDLKDAFFCLRLYPTSQPLFAFEWRDPEMGISGQLTWTRLPQGFKNSPTLFNEALHRDLADFRIQHPDLILLQYVDDLLLAATSELDCQQGTRALLQTLGNLGYRASAKKAQICQKQVKYLGYLLKEGQRWLTEARKETVMGQPTPKTPRQLREFLGKAGFCRLFIPGFAEMAAPLYPLTKPGTLFNWGPDQQKAYQEIKQALLTAPALGLPDLTKPFELFVDEKQGYAKGVLTQKLGPWRRPVAYLSKKLDPVAAGWPPCLRMVAAIAVLTKDAGKLTMGQPLVILAPHAVEALVKQPPDRWLSNARMTHYQALLLDTDRVQFGPVVALNPATLLPLPEEGLQHNCLDILAEAHGTRPDLTDQPLPDADHTWYTDGSSLLQEGQRKAGAAVTTETEVIWAKALPAGTSAQRAELIALTQALKMAEGKKLNVYTDSRYAFATAHIHGEIYRRRGWLTSEGKEIKNKDEILALLKALFLPKRLSIIHCPGHQKGHSAEARGNRMADQAARKAAITETPDTSTLLIENSSPNSRLIN

SEQ ID NO: 317 - protein, 683 aa, Synthetic construct
TLNIEDEHRLHETSKEPDVSLGSTWLSDFPQAWAETGGMGLAVRQAPLIIPLKATSTPVSIKQYPMSQEARLGIKPHIQRLLDQGILVPCQSPWNTPLLPVKKPGTNDYRPVQDLREVNKRVEDIHPTVPNPYNLLSGIPPSHQWYTVLDLKDAFFCLRLHPTSQPLFAFEWRDPEMGISGQLTWTRLPQGFKNSPTLFNEALHRDLADFRIQHPDLILLQYMDDLLLAATSELDCQQGTRALLQTLGNLGYRASAKKAQICQKQVKYLGYLLKEGQRWLTEARKETVMGQPTPKTPRQLREFLGKAGFCRLFIPGFAEMAAPLYPLTKPGTLFNWGPDQQKAYQEIKQALLTAPALGLPDLTKPFELFVDEKQGYAKGVLTQKLGPWRRPVAYLSKKLDPVAAGWPPCLRMVAAIAVLTKDAGKLTMGQPLVILAPHAVEALVKQPPDRWLSNARMTHYQALLLDTDRVQFGPVVALNPATLLPLPEEGLQHNCLDILAEAHGTRPDLTDQPLPDADHTWYTDGSSLLQEGQRKAGAAVTTETEVIWAKALPAGTSAQRAELIALTQALKMAEGKKLNVYTDSRYAFATAHIHGEIYRRRGWLTSEGKEIKNKDEILALLKALFLPKRLSIIHCPGHQKGHSAEARGNRMADQAARKAAITETPDTSTLLIENSSPNSRLIN

SEQ ID NO: 318 - protein, 683 aa, Synthetic construct
TLNIEDEHRLHETSKEPDVSLGSTWLSDFPQAWAETGGMGLAVRQAPLIIPLKATSTPVSIKQYPMSQEARLGIKPHIQRLLDQGILVPCQSPWNTPLLPVKKPGTNDYRPVQDLREVNKRVEDIHPTVPNPYNLLSGLPPSHQWYTVLDLKDAFFCLRLHPTSQPLFAFEWRDPEMGISGQLTWTRLPQGFKNSPTLFNEALHRDLADFRIQHPDLILLQYVDDLLLAATSELDCQQGTRALLQTLGNLGYRASAKKAQICQKQVKYLGYLLKEGQRWLTEARKETVMGQPTPKTPRQLREFLGKAGFCRLFIPGFAEMAAPLYPRTKPGTLFNWGPDQQKAYQEIKQALLTAPALGLPDLTKPFELFVDEKQGYAKGVLTQKLGPWRRPVAYLSKKLDPVAAGWPPCLRMVAAIAVLTKDAGKLTMGQPLVILAPHAVEALVKQPPDRWLSNARMTHYQALLLDTDRVQFGPVVALNPATLLPLPEEGLQHNCLDILAEAHGTRPDLTDQPLPDADHTWYTDGSSLLQEGQRKAGAAVTTETEVIWAKALPAGTSAQRAELIALTQALKMAEGKKLNVYTDSRYAFATAHIHGEIYRRRGWLTSEGKEIKNKDEILALLKALFLPKRLSIIHCPGHQKGHSAEARGNRMADQAARKAAITETPDTSTLLIENSSPNSRLIN

SEQ ID NO: 319 - protein, 683 aa, Synthetic construct
TLNIEDEHRLHETSKEPDVSLGSTWLSDFPQAWAETGGMGLAVRQAPLIIPLKATSTPVSIKQYPMSQEARLGIKPHIQRLLDQGILVPCQSPWNTPLLPVKKPGTNDYRPVQDLREVNKRVEDIHPTVPNPYNLLSGLPPSHQWYTVLDLKDAFFCLRLHPTSQPLFAFEWRDPEMGISGQLTWTRLPQGFKNSPTLFNEALHRDLADFRIQHPDLILLRYVDDLLLAATSELDCQQGTRALLQTLGNLGYRASTKKAQICQKQVKYLGYLLKEGQRWLTEARKETVLGQPTPKTPRQLREFLGKAGFCRLFIPGFAEMAAPLYPLTKPGTLFNWGPDQQKAYQEIKQALLTAPALGLPDLTKPFELFVDEKQGYAKGVLTQKLGPWRRPVAYLSKKLDPVAAGWPPCLRMVAAIAVLTKDAGKLTMGQPLVILAPHAVEALVKQPPDRWLSNARMTHYQALLLDTDRVQFGPVVALNPATLLPLPEEGLQHNCLDILAEAHGTRPDLTDQPLPDADHTWYTDGSSLLQEGQRKAGAAVTTETEVIWAKALPAGTSAQRAELIALTQALKMAEGKKLNVYTDSRYAFATAHIHGEIYRRRGWLTSEGKEIKNKDEILALLKALFLPKRLSIIHCPGHQKGHSAEARGNRMADQAARKAAITETPDTSTLLIENSSPNSRLIN

SEQ ID NO: 320 - protein, 683 aa, Synthetic construct
TLNIEDEHRLHETSKEPDVSLGSTWLSDFPQAWAETGGMGLAVRQAPLIIPLKATSTPVSIKQYPMSQEARLGIKPHIQRLLDQGILVPCQSPWNTPLLPVKKPGTNDYRPVQDLREVNKRVEDIHPTVPNPYNLLSGLPPSHQWYTVLDLKDAFFCLRLHPTSQPLFAFEWRDPEMGISGQLTWTRLPQGFKNSPTLFNEALHRDLADFRIQHPDLILLRYVDDLLLAATSELDCQQGTRALLQTLGNLGYRASAKKAQICQKQVKYLGYLLKEGQRWLTEARKETVMGQPTPKTPRQLREFLGKAGFCRLFIPGFAEMAAPLYPLTKPGTLFNWGPDQQKAYQEIKQALLTAPALGLPDLTKPFELFVDEKQGYAKGVLTQKLGPWRRPVAYLSKKLDPVAAGWPPCLRMVAAIAVLTKDAGKLTMGQPLVILAPHAVEALVKQPPDRWLSNARMTHYQALLLDTDRVQFGPVVALNPATLLPLPEEGLQHNCLDILAEAHGTRPDLTDQPLPDADHTWYTDGSSLLQEGQRKAGAAVTTETEVIWAKALPAGTSAQRAELIALTQALKMAEGKKLNVYTDSRYAFATAHIHGEIYRRRGWLTSEGKEIKNKDEILALLKALFLPKRLSIIHCPGHQKGHSAEARGNRMADQAARKAAITETPDTSTLLIENSSPNSRLIN

SEQ ID NO: 321 - protein, 683 aa, Synthetic construct
TLNIEDEHRLHETSKEPDVSLGSTWLSDFPQAWAETGGMGLAVRQAPLIIPLKATSTPVSIKQYPMSQEARLGIKPHIQRLLDQGILVPCQSPWNTPLLPVKKPGTNDYRPVQDLREVNKRVEDIHPTVPNPYNLLSGLPPSHQWYTVLDLKDAFFCLRLHPTSQPLFAFEWRDPEMGISDQLTWTRLPQGFKNSPTLFNEALHRDLADFRIQHPDLILLQYVDDLLLAATSELDCQQGTRALLQTLGNLGYRASAKKAQICQKQVKYLGYLLKEGQRWLTEARKETVMGQPTPKTPRQLREFLGKAGFCRLFIPGFAEMAAPLYPLTKPGTLFNWGPDQQKAYQEIKQALLTAPALGLPDLTKPFELFVDEKQGYAKGVLTQKLGPWRRPVAYLSKKLDPVAAGWPPCLRMVAAIAVLTKDAGKLTMGQPLVILAPHAVEALVKQPPDRWLSNARMTHYQALLLDTDRVQFGPVVALNPATLLPLPEEGLQHNCLDILAEAHGTRPDLTDQPLPDADHTWYTDGSSLLQEGQRKAGAAVTTETEVIWAKALPAGTSAQRAELIALTQALKMAEGKKLNVYTDSRYAFATAHIHGEIYRRRGWLTSEGKEIKNKDEILALLKALFLPKRLSIIHCPGHQKGHSAEARGNRMADQAARKAAITETPDTSTLLIENSSPNSRLIN

SEQ ID NO: 322 - protein, 683 aa, Synthetic construct
TLNIEDEHRLHETSKEPDVSLGSTWLSDFPQAWAETGGMGLAVRQAPLIIPLKATSTPVSIKQYPMSQEARLGIKPHIQRLLDQGILVPCQSPWNTPLLPVKKPGTNDYRPVQDLREVNKRVEDIHPTVPNPYNLLSGLPPSHQWYTDLDLKDAFFCLRLHPTSQPLFAFEWRDPEMGISGQLTWTRLPQGFKNSPTLFNEALHRDLADFRIQHPDLILLQYVDDLLLAATSELDCQQGTRALLQTLGNLGYRASAKKAQICQKQVKYLGYLLKEGQRWLTEARKETVMGQPTPKTPRQLREFLGKAGFCRLFIPGFAEMAAPLYPLTKPGTLFNWGPDQQKAYQEIKQALLTAPALGLPDLTKPFELFVDEKQGYAKGVLTQKLGPWRRPVAYLSKKLDPVAAGWPPCLRMVAAIAVLTKDAGKLTMGQPLVILAPHAVEALVKQPPDRWLSNARMTHYQALLLDTDRVQFGPVVALNPATLLPLPEEGLQHNCLDILAEAHGTRPDLTDQPLPDADHTWYTDGSSLLQEGQRKAGAAVTTETEVIWAKALPAGTSAQRAELIALTQALKMAEGKKLNVYTDSRYAFATAHIHGEIYRRRGWLTSEGKEIKNKDEILALLKALFLPKRLSIIHCPGHQKGHSAEARGNRMADQAARKAAITETPDTSTLLIENSSPNSRLIN

SEQ ID NO: 323 - protein, 683 aa, Synthetic construct
TLNIEDEHRLHETSKEPDVSLGSTWLSDFPQAWAETGGMGLAVRQAPLIIPLKATSTPVSIKQYPMSQEARLGIKPHIQRLLDQGILVPCQSPWNTPLLPVKKPGTNDYRPVQDLREVNKRVEDIHPTVPNPYNLLSGLPPSHQWYTVLDLKDAFFCLRLHPTSQPLFAFEWRDPEMGISGQLTWTRLPQGFKNSPTLFNEALHRDLADFRIQHPDLILLQYVDDLLLAVTSELDCQQGTRALLQTLGNLGYRASVKKAQICQKQVKYLGYLLKDGQRWLTEARKETVMGQPTPKTPRQLREFLGKAGFCRLFIPGFAEMAAPLYPLTKPGTLFNWGPDQQKAYQEIKQALLTAPALGLPDLTKPFELFVDEKQGYAKGVLTQKLGPWRRPVAYLSKKLDPVAAGWPPCLRMVAAIAVLTKDAGKLTMGQPLVILAPHAVEALVKQPPDRWLSNARMTHYQALLLDTDRVQFGPVVALNPATLLPLPEEGLQHNCLDILAEAHGTRPDLTDQPLPDADHTWYTDGSSLLQEGQRKAGAAVTTETEVIWAKALPAGTSAQRAELIALTQALKMAEGKKLNVYTDSRYAFATAHIHGEIYRRRGWLTSEGKEIKNKDEILALLKALFLPKRLSIIHCPGHQKGHSAEARGNRMADQAARKAAITETPDTSTLLIENSSPNSRLIN

SEQ ID NO: 324 - protein, 683 aa, Synthetic construct
TLNIEDEHRLHETSKEPDVSLGSTWLSDFPQAWAETGGMGLAVRQAPLIIPLKATSTPVSIKQYPMSQEARLGIKPHIQRLLDQGILVPCQSPWNTPLLPVKKPGTNDYRPVQDLREVNKRVEDIHPTVPNPYNLLSGLPPSHQWYTVLDLKDAFFCLRLHPTSQPLFAFEWRDPEMGISGQLTWTRLPQGFKNSPTLFNEALHRDLADFRIQHPDLILLQYVDDLLLAATSELDRQQGTRALLQTLGNLGYRASAKKAQICQKQVKYLGYLLKEGQRWLTEARKETVMGQPTPKTPRQLREFLGKAGFCRLFIPGFAEMAAPLYPLTKPGTLFNWGPDQQKAYQEIKQALLTAPALGLPDLTKPFELFVDEKQGYAKGVLTQKLGPWRRPVAYLSKKLDPVAAGWPPCLRMVAAIAVLTKDAGKLTMGQPLVILAPHAVEALVKQPPDRWLSNARMTHYQALLLDTDRVQFGPVVALNPATLLPLPEEGLQHNCLDILAEAHGTRPDLTDQPLPDADHTWYTDGSSLLQEGQRKAGAAVTTETEVIWAKALPAGTSAQRAELIALTQALKMAEGKKLNVYTDSRYAFATAHIHGEIYRRRGWLTSEGKEIKNKDEILALLKALFLPKRLSIIHCPGHQKGHSAEARGNRMADQAARKAAITETPDTSTLLIENSSPNSRLIN

SEQ ID NO: 325 - protein, 683 aa, Synthetic construct
TLNIEDEHRLHETSKEPDVSLGSTWLSDFPQAWAETGGMGLAVRQAPLIIPLKATSTPVSIKQYPMSQEARLGIKPHIQRLLDQGILVPCQSPWNTPLLPVKKPGTNDYRPVQDLREVNKRVEDIHPTVPNPYNLLSGLPPSHQWYTVLDLKDAFFCLRLHPTSQPLFAFEWRDPEMGISGQLTWTRLPQGFKNSPTLFNEALHRDLADFRIQHPDLILLQYVDDLLLAATSELDCQQGTRALLQTLGNLGHRASAKKAQICQKQVKYLGYLLKEGQRWLTEARKETVMGQPTPKTPRQLREFLGKAGFCRLFIPGFAEMAAPLFPLTKPGALFYWGPDQQKAYQEIKQALLTAPALGLPDLTKPFELFVDEKQGYAKGVLTQKLGPWRRPVAYLSKKLDPVAAGWPPCLRMVAAIAVLTKDAGKLTMGQPLVILAPHAVEALVKQPPDRWLSNARMTHYQALLLDTDRVQFGPVVALNPATLLPLPEEGLQHNCLDILAEAHGTRPDLTDQPLPDADHTWYTDGSSLLQEGQRKAGAAVTTETEVIWAKALPAGTSAQRAELIALTQALKMAEGKKLNVYTDSRYAFATAHIHGEIYRRRGWLTSEGKEIKNKDEILALLKALFLPKRLSIIHCPGHQKGHSAEARGNRMADQAARKAAITETPDTSTLLIENSSPNSRLIN

SEQ ID NO: 326 - protein, 683 aa, Synthetic construct
TLNIEDEHRLHETSKEPDVSLGSTWLSDFPQAWAETGGMGLAVRQAPLIIPLKATSTPVSIKQYPMSQEARLGIKPHIQRLLDQGILVPCQSPWNTPLLPVKKPGTNDYRPVQDLREVNKRVEDIHPTVPNPYNLLSGLPPSHQWYTVLDLKDAFFCLRLHPTSQPLFAFEWRDPEMGISGQLTWTRLPQGFKNSPTLFNEALHRDLADFRIQHPDLILLQYVDDLLLAATSELDWQQGTRALLQTLGNLGYRASAKKAQICQKQVKYLGYLLKEGQRWLTEARKETVMGQPTPKTPRQLREFLGKAGFCRLFIPGFAEMAAPLYPLTKPGTLFNWGPDQQKAYQEIKQALLTAPALGLPDLTKPFELFVDEKQGYAKGVLTQKLGPWRRPVAYLSKKLDPVAAGWPPCLRMVAAIAVLTKDAGKLTMGQPLVILAPHAVEALVKQPPDRWLSNARMTHYQALLLDTDRVQFGPVVALNPATLLPLPEEGLQHNCLDILAEAHGTRPDLTDQPLPDADHTWYTDGSSLLQEGQRKAGAAVTTETEVIWAKALPAGTSAQRAELIALTQALKMAEGKKLNVYTDSRYAFATAHIHGEIYRRRGWLTSEGKEIKNKDEILALLKALFLPKRLSIIHCPGHQKGHSAEARGNRMADQAARKAAITETPDTSTLLIENSSPNSRLIN

SEQ ID NO: 327 - protein, 683 aa, Synthetic construct
TLNIEDEHRLHETSKEPDVSLGSTWLSDFPQAWAETGGMGLAVRQAPLIIPLKATSTPVSIKQYPMSQEARLGIKPHIQRLLDQGILVPCQSPWNTPLLPVKKPGTNDYRPVQDLREVNKRVEDIHPTVPNPYNLLSGLPPSHQWYTVLDLKDAFFCLRLHPTSQPLFAFEWRDPEMGISGQLTWTRLPQGFKNSPTLFNEALHRDLADFRIQHPDLILLQYVDDLLLAATSELDSQQGTRALLQTLGNLGYRASAKKAQICQKQVKYLGYLLKEGQRWLTEARKETVMGQPTPKTPRQLREFLGKAGFCRLFIPGFAEMAAPLYPLTKPGTLFNWGPDQQKAYQEIKQALLTAPALGLPDLTKPFELFVDEKQGYAKGVLTQKLGPWRRPVAYLSKKLDPVAAGWPPCLRMVAAIAVLTKDAGKLTMGQPLVILAPHAVEALVKQPPDRWLSNARMTHYQALLLDTDRVQFGPVVALNPATLLPLPEEGLQHNCLDILAEAHGTRPDLTDQPLPDADHTWYTDGSSLLQEGQRKAGAAVTTETEVIWAKALPAGTSAQRAELIALTQALKMAEGKKLNVYTDSRYAFATAHIHGEIYRRRGWLTSEGKEIKNKDEILALLKALFLPKRLSIIHCPGHQKGHSAEARGNRMADQAARKAAITETPDTSTLLIENSSPNSRLIN

SEQ ID NO: 328 - protein, 683 aa, Synthetic construct
TLNIEDEHRLHETSKEPDVSLGSTWLSDFPQAWAETGGMGLAVRQAPLIIPLKATSTPVSIKQYPMSQEARLGIKPHIQRLLDQGILVPCQSPWNTPLLPVKKPGTNDYRPVQDLREVNKRVEDIHPTVPNPYNLLSGLPPSHQWYTVLDLKDAFFCLRLHPTSQPLFAFEWRDPEMGISGQLTWTRLPQGFKNSPTLFNEALHRDLADFRIQHPDLILLQYVDDLLLAATSELDCQQGTRALLQTLGNLGYRASAKKAQICQKQVKYLGYLLKEGQRWLTEARKETVRGQPTPKTPRQLREFLGKAGFCRLFIPGFAEMAAPLYPLTKPGTLFNWGPDQQKAYQEIKQALLTAPALGLPDLTKPFELFVDEKQGYAKGVLTQKLGPWRRPVAYLSKKLDPVAAGWPPCLRMVAAIAVLTKDAGKLTMGQPLVILAPHAVEALVKQPPDRWLSNARMTHYQALLLDTDRVQFGPVVALNPATLLPLPEEGLQHNCLDILAEAHGTRPDLTDQPLPDADHTWYTDGSSLLQEGQRKAGAAVTTETEVIWAKALPAGTSAQRAELIALTQALKMAEGKKLNVYTDSRYAFATAHIHGEIYRRRGWLTSEGKEIKNKDEILALLKALFLPKRLSIIHCPGHQKGHSAEARGNRMADQAARKAAITETPDTSTLLIENSSPNSRLIN

SEQ ID NO: 329 - protein, 683 aa, Synthetic construct
TLNIEDEHRLHETSKEPDVSLGSTWLSDFPQAWAETGGMGLAVRQAPLIIPLKATSTPVSIKQYPMSQEARLGIKPHIQRLLDQGILVPCQSPWNTPLLPVKKPGTNDYRPVQDLREVNKRVEDIHPTVPNPYNLLSGLPPSHQWYTVLDLKDAFFCLRLHPTSQPLFAFEWRDPEMGISGQLTWTRLPQGFKNSPTLFNEALHRDLADFRIQHPDLILLQYVDDLLLAATSELDCQQGTGALLQTLGNLGYRASAKKAQICQKQVKYLGYLLKEGQRWLTEARKETVMGQPTPKTPRQLREFLGKAGFCRLFIPGFAEMAAPLYPLTKPGTLFNWGPDQQKAYQEIKQALLTAPALGLPDLTKPFELFVDEKQGYAKGVLTQKLGPWRRPVAYLSKKLDPVAAGWPPCLRMVAAIAVLTKDAGKLTMGQPLVILAPHAVEALVKQPPDRWLSNARMTHYQALLLDTDRVQFGPVVALNPATLLPLPEEGLQHNCLDILAEAHGTRPDLTDQPLPDADHTWYTDGSSLLQEGQRKAGAAVTTETEVIWAKALPAGTSAQRAELIALTQALKMAEGKKLNVYTDSRYAFATAHIHGEIYRRRGWLTSEGKEIKNKDEILALLKALFLPKRLSIIHCPGHQKGHSAEARGNRMADQAARKAAITETPDTSTLLIENSSPNSRLIN

SEQ ID NO: 330 - protein, 683 aa, Synthetic construct
TLNIEDEHRLHETSKEPDVSLGSTWLSDFPQAWAETGGMGLAVRQAPLIIPLKATSTPVSIKQYPMSQEARLGIKPHIQRLLDQGILVPCQSPWNTPLLPVKKPGTNDYRPVQDLREVNKRVEDIHPTVPNPYNLLSGLPPSHQWYTVLDLKDAFFCLRLHPTSQPLFAFEWRDPEMGISGQLTWTRLPQGFKNSPTLFNEALHRDLADFRIQHPDLILLQYVDDLLLAATSELDCQRGTRALLQTLGNLGYRASAKKAQICQKQVKYLGYLLKEGQRWLTEARKETVMGQPTPKTPRQLREFLGKAGFCRLFIPGFAEMAAPLYPLTKPGTLFNWGPDQQKAYQEIKQALLTAPALGLPDLTKPFELFVDEKQGYAKGVLTQKLGPWRRPVAYLSKKLDPVAAGWPPCLRMVAAIAVLTKDAGKLTMGQPLVILAPHAVEALVKQPPDRWLSNARMTHYQALLLDTDRVQFGPVVALNPATLLPLPEEGLQHNCLDILAEAHGTRPDLTDQPLPDADHTWYTDGSSLLQEGQRKAGAAVTTETEVIWAKALPAGTSAQRAELIALTQALKMAEGKKLNVYTDSRYAFATAHIHGEIYRRRGWLTSEGKEIKNKDEILALLKALFLPKRLSIIHCPGHQKGHSAEARGNRMADQAARKAAITETPDTSTLLIENSSPNSRLIN

SEQ ID NO: 331 - protein, 683 aa, Synthetic construct
TLNIEDEHRLHETSKEPDVSLGSTWLSDFPQAWAETGGMGLAVRQAPLIIPLKATSTPVSIKQYPMSQEARLGIKPHIQRLLDQGILVPCQSPWNTPLLPVKKPGTNDYRPVQDLREVNKRVEDIHPTVPNPYNLLSGLPPSHQWYTVLDLKDAFFCLRLHPTSQPLFAFEWRDPEMGISGQLTWTRLPQGFKNSPTLFNEALHRDLADFRIQHPDLILLQYVDDLLLAATSEFDCQQGTRALLQTLGNLGYRASAKKAQICQKQVKYLGYLLKEGQRWLTEARKETVMGQPTPKTPRQLREFLGKAGFCRLFIPGFAEMAAPLYPLTKPGTLFNWGPDQQKAYQEIKQALLTAPALGLPDLTKPFELFVDEKQGYAKGVLTQKLGPWRRPVAYLSKKLDPVAAGWPPCLRMVAAIAVLTKDAGKLTMGQPLVILAPHAVEALVKQPPDRWLSNARMTHYQALLLDTDRVQFGPVVALNPATLLPLPEEGLQHNCLDILAEAHGTRPDLTDQPLPDADHTWYTDGSSLLQEGQRKAGAAVTTETEVIWAKALPAGTSAQRAELIALTQALKMAEGKKLNVYTDSRYAFATAHIHGEIYRRRGWLTSEGKEIKNKDEILALLKALFLPKRLSIIHCPGHQKGHSAEARGNRMADQAARKAAITETPDTSTLLIENSSPNSRLIN

SEQ ID NO: 332 - protein, 683 aa, Synthetic construct
TLNIEDEHRLHETSKEPDVSLGSTWLSDFPQAWAETGGMGLAVRQAPLIIPLKATSTPVSIKQYPMSQEARLGIKPHIQRLLDQGILVPCQSPWNTPLLPVKKPGTNDYRPVQDLREVNKRVEDIHPTVPNPYNLLSGLPPSHQWYTVLDLKDAFFCLRLHPTSQPLFAFEWRDPEMGISGQLTWTRLPRGFKNSPTLFNEALHRDLADFRIQHPDLILLQYVDDLLLAATSELDCQQGTRALLQTLGNLGYRASAKKAQICQKQVKYLGYLLKEGQRWLTEARKETVMGQPTPKTPRQLREFLGKAGFCRLFIPGFAEMDAPLYPLTKPGTLFNWGPDQQKAYQEIKQALLTAPALGLPDLTKPFELFVDEKQGYAKGVLTQKLGPWRRPVAYLSKKLDPVAAGWPPCLRMVAAIAVLTKDAGKLTMGQPLVILAPHAVEALVKQPPDRWLSNARMTHYQALLLDTDRVQFGPVVALNPATLLPLPEEGLQHNCLDILAEAHGTRPDLTDQPLPDADHTWYTDGSSLLQEGQRKAGAAVTTETEVIWAKALPAGTSAQRAELIALTQALKMAEGKKLNVYTDSRYAFATAHIHGEIYRRRGWLTSEGKEIKNKDEILALLKALFLPKRLSIIHCPGHQKGHSAEARGNRMADQAARKAAITETPDTSTLLIENSSPNSRLIN

SEQ ID NO: 333 - protein, 683 aa, Synthetic construct
TLNIEDEHRLHETSKEPDVSLGSTWLSDFPQAWAETGGMGLAVRQAPLIIPLKATSTPVSIKQYPMSQEARLGIKPHIQRLLDQGILVPCQSPWNTPLLPVKKPGTNDYRPVQDLREVNKRVEDIHPTVPNPYNLLSGLPPSHQWYTVLDLKDAFFCLRLHPTSQPLFAFEWRDPEMGISGQLTWTRLPQGFKNSPTLFNEALHRDLADFRIQHPDLILLQYVDGLLLAATSELDCHQGTRALLQTLGNLGYRASAKKAQICQKQVKYLGYLLKEGQRWLTEARKETVMGQPTPKTPRQLREFLGKAGFCRLFIPGFAEMAAPLYPLTKPGTLFNWGPDQQKAYQEIKQALLTAPALGLPDLTKPFELFVDEKQGYAKGVLTQKLGPWRRPVAYLSKKLDPVAAGWPPCLRMVAAIAVLTKDAGKLTMGQPLVILAPHAVEALVKQPPDRWLSNARMTHYQALLLDTDRVQFGPVVALNPATLLPLPEEGLQHNCLDILAEAHGTRPDLTDQPLPDADHTWYTDGSSLLQEGQRKAGAAVTTETEVIWAKALPAGTSAQRAELIALTQALKMAEGKKLNVYTDSRYAFATAHIHGEIYRRRGWLTSEGKEIKNKDEILALLKALFLPKRLSIIHCPGHQKGHSAEARGNRMADQAARKAAITETPDTSTLLIENSSPNSRLIN

SEQ ID NO: 334 - DNA, 2049 bp, Synthetic construct
  source 1..2049: mol_type = other DNA
acacttaatattgaggatgaacatagattgcacgagacctctaaggaacctgatgtttctcttggatcaacttggttgtcagatttcccacaagcatgggcagagaccggaggtatgggtcttgctgttaggcaggcaccacttattattcctttgaaggcaacctctactcctgtgtcaattaagcaatatccaatgtctcaggaagctaggcttggaattaagcctcacattcaaagacttttggatcagggtattttggtgccatgtcaatcaccttggaacacaccacttttgcctgttaagaagcctggaactaatgattacagaccagtgcaagatttgagggaggttaacaagagagtggaagatattcacccaactgttccaaacccttataatcttttgtctggattgccaccttcacatcaatggtacactgtgcttgatttgaaggatgcatttttctgccttaggttgcatccaacatctcagcctctttttgctttcgagtggagagatcctgaaatgggaatttctggtcaacttacatggaccaggttgcctcagggtttcaagaactcaccaaccttgtttaatgaggcacttcacagggatttggctgattttaggattcaacatcctgatcttatccttttgcagtatgttgatgatcttttgcttgctgcaacttctgaattggattgtcaacagggaactagggcattgcttcaaacacttggaaatttgggttacagagcttcagcaaagaaggctcagatttgccaaaagcaggttaagtatcttggatacttgcttaaggaaggacaaaggtggttgaccgaggctagaaaggaaactgtgatgggtcaaccaacacctaagacccctaggcagcttagagagttcttgggaaaggcaggtttttgtaggcttttcattccaggatttgctgaaatggctgcaccactttatcctttgaccaagcctggaactttgtttaactggggtccagatcaacagaaggcataccaagaaattaagcaggctttgcttactgctccagcacttggtttgcctgatcttacaaagccatttgagttgttcgttgatgaaaagcaaggatatgcaaagggtgtgcttacccagaagttgggaccttggagaaggcctgttgcttacctttctaagaaacttgatccagtggctgcaggttggccaccttgtcttagaatggttgctgcaattgcagtgcttacaaaggatgctggaaagttgactatgggacaacctcttgttattttggcaccacacgctgttgaggcacttgtgaagcagccacctgataggtggttgtcaaacgcaagaatgacccattatcaagctcttcttttggatactgatagggtgcagttcggtcctgttgtggctttgaatccagcaacacttttgccacttcctgaggaaggattgcaacacaactgccttgatattttggctgaggcacatggtacaagacctgatcttaccgatcagccattgcctgatgctgatcacacttggtacacagatggatcttcacttttgcaagaaggacagaggaaggctggtgctgcagttactacagagactgaagtgatttgggctaaggcacttccagctggaacatctgctcaaagagcagagcttattgctttgacccaggcacttaagatggctgaaggaaagaagttgaacgtttacactgattctaggtatgctttcgcaacagctcatattcacggagaaatctatagaaggagaggatggttgacatcagagggaaaggaaattaagaacaaggatgaaattcttgcacttttgaaggctctttttcttcctaagagattgtctattattcattgcccaggacaccaaaagggtcattcagcagaagctaggggaaatagaatggctgatcaggctgcaagaaaggctgcaattactgagacacctgatacctctactcttttgatcgaaaactcttcaccaaattcaaggcttattaac

SEQ ID NO: 335 - DNA, 2049 bp, Synthetic construct
  source 1..2049: mol_type = other DNA
acacttaatattgaggatgaacatagattgcacgagacctctaaggaacctgatgtttctcttggatcaacttggttgtcagatttcccacaagcatgggcagagaccggaggtatgggtcttgctgttaggcaggcaccacttattattcctttgaaggcaacctctactcctgtgtcaattaagcaatatccaatttctcaggaagctaggcttggaattaagcctcacattcaaagacttttggatcagggtattttggtgccatgtcaatcaccttggaacacaccacttttgcctgttaagaagcctggaactaatgattacagaccagtgcaagatttgagggaggttaacaagagagtggaagatattcacccaactgttccaaacccttataatcttttgtctggattgccaccttcacatcaatggtacactgtgcttgatttgaaggatgcatttttctgccttaggttgcatccaacatctcagcctctttttgctttcgagtggagagatcctgaaatgggaatttctggtcaacttacatggaccaggttgcctcagggtttcaagaactcaccaaccttgtttaatgaggcacttcacagggatttggctgattttaggattcaacatcctgatcttatccttttgcagtatgttgatgatcttttgcttgctgcaacttctgaattggattgtcaacagggaactagggcattgcttcaaacacttggaaatttgggttacagagcttcagcaaagaaggctcagatttgccaaaagcaggttaagtatcttggatacttgcttaaggaaggacaaaggtggttgaccgaggctagaaaggaaactgtgatgggtcaaccaacacctaagacccctaggcagcttagagagttcttgggaaaggcaggtttttgtaggcttttcattccaggatttgctgaaatggctgcaccactttatcctttgaccaagcctggaactttgtttaactggggtccagatcaacagaaggcataccaagaaattaagcaggctttgcttactgctccagcacttggtttgcctgatcttacaaagccatttgagttgttcgttgatgaaaagcaaggatatgcaaagggtgtgcttacccagaagttgggaccttggagaaggcctgttgcttacctttctaagaaacttgatccagtggctgcaggttggccaccttgtcttagaatggttgctgcaattgcagtgcttacaaaggatgctggaaagttgactatgggacaacctcttgttattttggcaccacacgctgttgaggcacttgtgaagcagccacctgataggtggttgtcaaacgcaagaatgacccattatcaagctcttcttttggatactgatagggtgcagttcggtcctgttgtggctttgaatccagcaacacttttgccacttcctgaggaaggattgcaacacaactgccttgatattttggctgaggcacatggtacaagacctgatcttaccgatcagccattgcctgatgctgatcacacttggtacacagatggatcttcacttttgcaagaaggacagaggaaggctggtgctgcagttactacagagactgaagtgatttgggctaaggcacttccagctggaacatctgctcaaagagcagagcttattgctttgacccaggcacttaagatggctgaaggaaagaagttgaacgtttacactgattctaggtatgctttcgcaacagctcatattcacggagaaatctatagaaggagaggatggttgacatcagagggaaaggaaattaagaacaaggatgaaattcttgcacttttgaaggctctttttcttcctaagagattgtctattattcattgcccaggacaccaaaagggtcattcagcagaagctaggggaaatagaatggctgatcaggctgcaagaaaggctgcaattactgagacacctgatacctctactcttttgatcgaaaactcttcaccaaattcaaggcttattaac

SEQ ID NO: 336 - DNA, 2049 bp, Synthetic construct
  source 1..2049: mol_type = other DNA
acacttaatattgaggatgaacatagattgcacgagacctctaaggaacctgatgtttctcttggatcaacttggttgtcagatttcccacaagcatgggcagagaccggaggtatgggtcttgctgttaggcaggcaccacttattattcctttgaaggcaacctctactcctgtgtcaattaagcaatatccactttctcaggaagctaggcttggaattaagcctcacattcaaagacttttggatcagggtattttggtgccatgtcaatcaccttggaacacaccacttttgcctgttaagaagcctggaactaatgattacagaccagtgcaagatttgagggaggttaacaagagagtggaagatattcacccaactgttccaaacccttataatcttttgtctggattgccaccttcacatcaatggtacactgtgcttgatttgaaggatgcatttttctgccttaggttgcatccaacatctcagcctctttttgctttcgagtggagagatcctgaaatgggaatttctggtcaacttacatggaccaggttgcctcagggtttcaagaactcaccaaccttgtttaatgaggcacttcacagggatttggctgattttaggattcaacatcctgatcttatccttttgcagtatgttgatgatcttttgcttgctgcaacttctgaattggattgtcaacagggaactagggcattgcttcaaacacttggaaatttgggttacagagcttcagcaaagaaggctcagatttgccaaaagcaggttaagtatcttggatacttgcttaaggaaggacaaaggtggttgaccgaggctagaaaggaaactgtgatgggtcaaccaacacctaagacccctaggcagcttagagagttcttgggaaaggcaggtttttgtaggcttttcattccaggatttgctgaaatggctgcaccactttatcctttgaccaagcctggaactttgtttaactggggtccagatcaacagaaggcataccaagaaattaagcaggctttgcttactgctccagcacttggtttgcctgatcttacaaagccatttgagttgttcgttgatgaaaagcaaggatatgcaaagggtgtgcttacccagaagttgggaccttggagaaggcctgttgcttacctttctaagaaacttgatccagtggctgcaggttggccaccttgtcttagaatggttgctgcaattgcagtgcttacaaaggatgctggaaagttgactatgggacaacctcttgttattttggcaccacacgctgttgaggcacttgtgaagcagccacctgataggtggttgtcaaacgcaagaatgacccattatcaagctcttcttttggatactgatagggtgcagttcggtcctgttgtggctttgaatccagcaacacttttgccacttcctgaggaaggattgcaacacaactgccttgatattttggctgaggcacatggtacaagacctgatcttaccgatcagccattgcctgatgctgatcacacttggtacacagatggatcttcacttttgcaagaaggacagaggaaggctggtgctgcagttactacagagactgaagtgatttgggctaaggcacttccagctggaacatctgctcaaagagcagagcttattgctttgacccaggcacttaagatggctgaaggaaagaagttgaacgtttacactgattctaggtatgctttcgcaacagctcatattcacggagaaatctatagaaggagaggatggttgacatcagagggaaaggaaattaagaacaaggatgaaattcttgcacttttgaaggctctttttcttcctaagagattgtctattattcattgcccaggacaccaaaagggtcattcagcagaagctaggggaaatagaatggctgatcaggctgcaagaaaggctgcaattactgagacacctgatacctctactcttttgatcgaaaactcttcaccaaattcaaggcttattaac

SEQ ID NO: 337 - DNA, 2049 bp, Synthetic construct
  source 1..2049: mol_type = other DNA
acacttaatattgaggatgaacatagattgcacgagacctctaaggaacctgatgtttctcttggatcaacttggttgtcagatttcccacaagcatgggcagagaccggaggtatgggtcttgctgttaggcaggcaccacttattattcctttgaaggcaacctctactcctgtgtcaattaagcaatatccagtgtctcaggaagctaggcttggaattaagcctcacattcaaagacttttggatcagggtattttggtgccatgtcaatcaccttggaacacaccacttttgcctgttaagaagcctggaactaatgattacagaccagtgcaagatttgagggaggttaacaagagagtggaagatattcacccaactgttccaaacccttataatcttttgtctggattgccaccttcacatcaatggtacactgtgcttgatttgaaggatgcatttttctgccttaggttgcatccaacatctcagcctctttttgctttcgagtggagagatcctgaaatgggaatttctggtcaacttacatggaccaggttgcctcagggtttcaagaactcaccaaccttgtttaatgaggcacttcacagggatttggctgattttaggattcaacatcctgatcttatccttttgcagtatgttgatgatcttttgcttgctgcaacttctgaattggattgtcaacagggaactagggcattgcttcaaacacttggaaatttgggttacagagcttcagcaaagaaggctcagatttgccaaaagcaggttaagtatcttggatacttgcttaaggaaggacaaaggtggttgaccgaggctagaaaggaaactgtgatgggtcaaccaacacctaagacccctaggcagcttagagagttcttgggaaaggcaggtttttgtaggcttttcattccaggatttgctgaaatggctgcaccactttatcctttgaccaagcctggaactttgtttaactggggtccagatcaacagaaggcataccaagaaattaagcaggctttgcttactgctccagcacttggtttgcctgatcttacaaagccatttgagttgttcgttgatgaaaagcaaggatatgcaaagggtgtgcttacccagaagttgggaccttggagaaggcctgttgcttacctttctaagaaacttgatccagtggctgcaggttggccaccttgtcttagaatggttgctgcaattgcagtgcttacaaaggatgctggaaagttgactatgggacaacctcttgttattttggcaccacacgctgttgaggcacttgtgaagcagccacctgataggtggttgtcaaacgcaagaatgacccattatcaagctcttcttttggatactgatagggtgcagttcggtcctgttgtggctttgaatccagcaacacttttgccacttcctgaggaaggattgcaacacaactgccttgatattttggctgaggcacatggtacaagacctgatcttaccgatcagccattgcctgatgctgatcacacttggtacacagatggatcttcacttttgcaagaaggacagaggaaggctggtgctgcagttactacagagactgaagtgatttgggctaaggcacttccagctggaacatctgctcaaagagcagagcttattgctttgacccaggcacttaagatggctgaaggaaagaagttgaacgtttacactgattctaggtatgctttcgcaacagctcatattcacggagaaatctatagaaggagaggatggttgacatcagagggaaaggaaattaagaacaaggatgaaattcttgcacttttgaaggctctttttcttcctaagagattgtctattattcattgcccaggacaccaaaagggtcattcagcagaagctaggggaaatagaatggctgatcaggctgcaagaaaggctgcaattactgagacacctgatacctctactcttttgatcgaaaactcttcaccaaattcaaggcttattaac

SEQ ID NO: 338 - DNA, 2049 bp, Synthetic construct
  source 1..2049: mol_type = other DNA
acacttaatattgaggatgaacatagattgcacgagacctctaaggaacctgatgtttctcttggatcaacttggttgtcagatttcccacaagcatgggcagagaccggaggtatgggtcttgctgttaggcaggcaccacttattattcctttgaaggcaacctctactcctgtgtcaattaagcaatatccaaactctcaggaagctaggcttggaattaagcctcacattcaaagacttttggatcagggtattttggtgccatgtcaatcaccttggaacacaccacttttgcctgttaagaagcctggaactaatgattacagaccagtgcaagatttgagggaggttaacaagagagtggaagatattcacccaactgttccaaacccttataatcttttgtctggattgccaccttcacatcaatggtacactgtgcttgatttgaaggatgcatttttctgccttaggttgcatccaacatctcagcctctttttgctttcgagtggagagatcctgaaatgggaatttctggtcaacttacatggaccaggttgcctcagggtttcaagaactcaccaaccttgtttaatgaggcacttcacagggatttggctgattttaggattcaacatcctgatcttatccttttgcagtatgttgatgatcttttgcttgctgcaacttctgaattggattgtcaacagggaactagggcattgcttcaaacacttggaaatttgggttacagagcttcagcaaagaaggctcagatttgccaaaagcaggttaagtatcttggatacttgcttaaggaaggacaaaggtggttgaccgaggctagaaaggaaactgtgatgggtcaaccaacacctaagacccctaggcagcttagagagttcttgggaaaggcaggtttttgtaggcttttcattccaggatttgctgaaatggctgcaccactttatcctttgaccaagcctggaactttgtttaactggggtccagatcaacagaaggcataccaagaaattaagcaggctttgcttactgctccagcacttggtttgcctgatcttacaaagccatttgagttgttcgttgatgaaaagcaaggatatgcaaagggtgtgcttacccagaagttgggaccttggagaaggcctgttgcttacctttctaagaaacttgatccagtggctgcaggttggccaccttgtcttagaatggttgctgcaattgcagtgcttacaaaggatgctggaaagttgactatgggacaacctcttgttattttggcaccacacgctgttgaggcacttgtgaagcagccacctgataggtggttgtcaaacgcaagaatgacccattatcaagctcttcttttggatactgatagggtgcagttcggtcctgttgtggctttgaatccagcaacacttttgccacttcctgaggaaggattgcaacacaactgccttgatattttggctgaggcacatggtacaagacctgatcttaccgatcagccattgcctgatgctgatcacacttggtacacagatggatcttcacttttgcaagaaggacagaggaaggctggtgctgcagttactacagagactgaagtgatttgggctaaggcacttccagctggaacatctgctcaaagagcagagcttattgctttgacccaggcacttaagatggctgaaggaaagaagttgaacgtttacactgattctaggtatgctttcgcaacagctcatattcacggagaaatctatagaaggagaggatggttgacatcagagggaaaggaaattaagaacaaggatgaaattcttgcacttttgaaggctctttttcttcctaagagattgtctattattcattgcccaggacaccaaaagggtcattcagcagaagctaggggaaatagaatggctgatcaggctgcaagaaaggctgcaattactgagacacctgatacctctactcttttgatcgaaaactcttcaccaaattcaaggcttattaac

SEQ ID NO: 339 - DNA, 2049 bp, Synthetic construct
  source 1..2049: mol_type = other DNA
acacttaatattgaggatgaacatagattgcacgagacctctaaggaacctgatgtttctcttggatcaacttggttgtcagatttcccacaagcatgggcagagaccggaggtatgggtcttgctgttaggcaggcaccacttattattcctttgaaggcaacctctactcctgtgtcaattaagcaatatccaaagtctcaggaagctaggcttggaattaagcctcacattcaaagacttttggatcagggtattttggtgccatgtcaatcaccttggaacacaccacttttgcctgttaagaagcctggaactaatgattacagaccagtgcaagatttgagggaggttaacaagagagtggaagatattcacccaactgttccaaacccttataatcttttgtctggattgccaccttcacatcaatggtacactgtgcttgatttgaaggatgcatttttctgccttaggttgcatccaacatctcagcctctttttgctttcgagtggagagatcctgaaatgggaatttctggtcaacttacatggaccaggttgcctcagggtttcaagaactcaccaaccttgtttaatgaggcacttcacagggatttggctgattttaggattcaacatcctgatcttatccttttgcagtatgttgatgatcttttgcttgctgcaacttctgaattggattgtcaacagggaactagggcattgcttcaaacacttggaaatttgggttacagagcttcagcaaagaaggctcagatttgccaaaagcaggttaagtatcttggatacttgcttaaggaaggacaaaggtggttgaccgaggctagaaaggaaactgtgatgggtcaaccaacacctaagacccctaggcagcttagagagttcttgggaaaggcaggtttttgtaggcttttcattccaggatttgctgaaatggctgcaccactttatcctttgaccaagcctggaactttgtttaactggggtccagatcaacagaaggcataccaagaaattaagcaggctttgcttactgctccagcacttggtttgcctgatcttacaaagccatttgagttgttcgttgatgaaaagcaaggatatgcaaagggtgtgcttacccagaagttgggaccttggagaaggcctgttgcttacctttctaagaaacttgatccagtggctgcaggttggccaccttgtcttagaatggttgctgcaattgcagtgcttacaaaggatgctggaaagttgactatgggacaacctcttgttattttggcaccacacgctgttgaggcacttgtgaagcagccacctgataggtggttgtcaaacgcaagaatgacccattatcaagctcttcttttggatactgatagggtgcagttcggtcctgttgtggctttgaatccagcaacacttttgccacttcctgaggaaggattgcaacacaactgccttgatattttggctgaggcacatggtacaagacctgatcttaccgatcagccattgcctgatgctgatcacacttggtacacagatggatcttcacttttgcaagaaggacagaggaaggctggtgctgcagttactacagagactgaagtgatttgggctaaggcacttccagctggaacatctgctcaaagagcagagcttattgctttgacccaggcacttaagatggctgaaggaaagaagttgaacgtttacactgattctaggtatgctttcgcaacagctcatattcacggagaaatctatagaaggagaggatggttgacatcagagggaaaggaaattaagaacaaggatgaaattcttgcacttttgaaggctctttttcttcctaagagattgtctattattcattgcccaggacaccaaaagggtcattcagcagaagctaggggaaatagaatggctgatcaggctgcaagaaaggctgcaattactgagacacctgatacctctactcttttgatcgaaaactcttcaccaaattcaaggcttattaac

SEQ ID NO: 340 - DNA, 2049 bp, Synthetic construct
  source 1..2049: mol_type = other DNA
acacttaatattgaggatgaacatagattgcacgagacctctaaggaacctgatgtttctcttggatcaacttggttgtcagatttcccacaagcatgggcagagaccggaggtatgggtcttgctgttaggcaggcaccacttattattcctttgaaggcaacctctactcctgtgtcaattaagcaatatccaatgtctcaggaagctaggcttggaattaagcctcacattcaaagacttttggatcagggtattttggtgccatgtcaatcaccttggaacacaccacttttgcctgttaagaagcctggaactaatgattacagaccagtgcaagatttgagggaggttaacaagagagtggaagatattcacccaactgttccaaacccttataatcttttgtctggattgccaccttcacatcaatggtacactgtgcttgatttgaaggatgcatttttctgccttaggttgtatccaacatctcagcctctttttgctttcgagtggagagatcctgaaatgggaatttctggtcaacttacatggaccaggttgcctcagggtttcaagaactcaccaaccttgtttaatgaggcacttcacagggatttggctgattttaggattcaacatcctgatcttatccttttgcagtatgttgatgatcttttgcttgctgcaacttctgaattggattgtcaacagggaactagggcattgcttcaaacacttggaaatttgggttacagagcttcagcaaagaaggctcagatttgccaaaagcaggttaagtatcttggatacttgcttaaggaaggacaaaggtggttgaccgaggctagaaaggaaactgtgatgggtcaaccaacacctaagacccctaggcagcttagagagttcttgggaaaggcaggtttttgtaggcttttcattccaggatttgctgaaatggctgcaccactttatcctttgaccaagcctggaactttgtttaactggggtccagatcaacagaaggcataccaagaaattaagcaggctttgcttactgctccagcacttggtttgcctgatcttacaaagccatttgagttgttcgttgatgaaaagcaaggatatgcaaagggtgtgcttacccagaagttgggaccttggagaaggcctgttgcttacctttctaagaaacttgatccagtggctgcaggttggccaccttgtcttagaatggttgctgcaattgcagtgcttacaaaggatgctggaaagttgactatgggacaacctcttgttattttggcaccacacgctgttgaggcacttgtgaagcagccacctgataggtggttgtcaaacgcaagaatgacccattatcaagctcttcttttggatactgatagggtgcagttcggtcctgttgtggctttgaatccagcaacacttttgccacttcctgaggaaggattgcaacacaactgccttgatattttggctgaggcacatggtacaagacctgatcttaccgatcagccattgcctgatgctgatcacacttggtacacagatggatcttcacttttgcaagaaggacagaggaaggctggtgctgcagttactacagagactgaagtgatttgggctaaggcacttccagctggaacatctgctcaaagagcagagcttattgctttgacccaggcacttaagatggctgaaggaaagaagttgaacgtttacactgattctaggtatgctttcgcaacagctcatattcacggagaaatctatagaaggagaggatggttgacatcagagggaaaggaaattaagaacaaggatgaaattcttgcacttttgaaggctctttttcttcctaagagattgtctattattcattgcccaggacaccaaaagggtcattcagcagaagctaggggaaatagaatggctgatcaggctgcaagaaaggctgcaattactgagacacctgatacctctactcttttgatcgaaaactcttcaccaaattcaaggcttattaac

SEQ ID NO: 341 - DNA, 2049 bp, Synthetic construct
  source 1..2049: mol_type = other DNA
acacttaatattgaggatgaacatagattgcacgagacctctaaggaacctgatgtttctcttggatcaacttggttgtcagatttcccacaagcatgggcagagaccggaggtatgggtcttgctgttaggcaggcaccacttattattcctttgaaggcaacctctactcctgtgtcaattaagcaatatccaatgtctcaggaagctaggcttggaattaagcctcacattcaaagacttttggatcagggtattttggtgccatgtcaatcaccttggaacacaccacttttgcctgttaagaagcctggaactaatgattacagaccagtgcaagatttgagggaggttaacaagagagtggaagatattcacccaactgttccaaacccttataatcttttgtctggattgccaccttcacatcaatggtacactgtgcttgatttgaaggatgcatttttctgccttaggttgcttccaacatctcagcctctttttgctttcgagtggagagatcctgaaatgggaatttctggtcaacttacatggaccaggttgcctcagggtttcaagaactcaccaaccttgtttaatgaggcacttcacagggatttggctgattttaggattcaacatcctgatcttatccttttgcagtatgttgatgatcttttgcttgctgcaacttctgaattggattgtcaacagggaactagggcattgcttcaaacacttggaaatttgggttacagagcttcagcaaagaaggctcagatttgccaaaagcaggttaagtatcttggatacttgcttaaggaaggacaaaggtggttgaccgaggctagaaaggaaactgtgatgggtcaaccaacacctaagacccctaggcagcttagagagttcttgggaaaggcaggtttttgtaggcttttcattccaggatttgctgaaatggctgcaccactttatcctttgaccaagcctggaactttgtttaactggggtccagatcaacagaaggcataccaagaaattaagcaggctttgcttactgctccagcacttggtttgcctgatcttacaaagccatttgagttgttcgttgatgaaaagcaaggatatgcaaagggtgtgcttacccagaagttgggaccttggagaaggcctgttgcttacctttctaagaaacttgatccagtggctgcaggttggccaccttgtcttagaatggttgctgcaattgcagtgcttacaaaggatgctggaaagttgactatgggacaacctcttgttattttggcaccacacgctgttgaggcacttgtgaagcagccacctgataggtggttgtcaaacgcaagaatgacccattatcaagctcttcttttggatactgatagggtgcagttcggtcctgttgtggctttgaatccagcaacacttttgccacttcctgaggaaggattgcaacacaactgccttgatattttggctgaggcacatggtacaagacctgatcttaccgatcagccattgcctgatgctgatcacacttggtacacagatggatcttcacttttgcaagaaggacagaggaaggctggtgctgcagttactacagagactgaagtgatttgggctaaggcacttccagctggaacatctgctcaaagagcagagcttattgctttgacccaggcacttaagatggctgaaggaaagaagttgaacgtttacactgattctaggtatgctttcgcaacagctcatattcacggagaaatctatagaaggagaggatggttgacatcagagggaaaggaaattaagaacaaggatgaaattcttgcacttttgaaggctctttttcttcctaagagattgtctattattcattgcccaggacaccaaaagggtcattcagcagaagctaggggaaatagaatggctgatcaggctgcaagaaaggctgcaattactgagacacctgatacctctactcttttgatcgaaaactcttcaccaaattcaaggcttattaac

SEQ ID NO: 342 - DNA, 2049 bp, Synthetic construct
  source 1..2049: mol_type = other DNA
acacttaatattgaggatgaacatagattgcacgagacctctaaggaacctgatgtttctcttggatcaacttggttgtcagatttcccacaagcatgggcagagaccggaggtatgggtcttgctgttaggcaggcaccacttattattcctttgaaggcaacctctactcctgtgtcaattaagcaatatccaatgtctcaggaagctaggcttggaattaagcctcacattcaaagacttttggatcagggtattttggtgccatgtcaatcaccttggaacacaccacttttgcctgttaagaagcctggaactaatgattacagaccagtgcaagatttgagggaggttaacaagagagtggaagatattcacccaactgttccaaacccttataatcttttgtctggattgccaccttcacatcaatggtacactgtgcttgatttgaaggatgcatttttctgccttaggttggctccaacatctcagcctctttttgctttcgagtggagagatcctgaaatgggaatttctggtcaacttacatggaccaggttgcctcagggtttcaagaactcaccaaccttgtttaatgaggcacttcacagggatttggctgattttaggattcaacatcctgatcttatccttttgcagtatgttgatgatcttttgcttgctgcaacttctgaattggattgtcaacagggaactagggcattgcttcaaacacttggaaatttgggttacagagcttcagcaaagaaggctcagatttgccaaaagcaggttaagtatcttggatacttgcttaaggaaggacaaaggtggttgaccgaggctagaaaggaaactgtgatgggtcaaccaacacctaagacccctaggcagcttagagagttcttgggaaaggcaggtttttgtaggcttttcattccaggatttgctgaaatggctgcaccactttatcctttgaccaagcctggaactttgtttaactggggtccagatcaacagaaggcataccaagaaattaagcaggctttgcttactgctccagcacttggtttgcctgatcttacaaagccatttgagttgttcgttgatgaaaagcaaggatatgcaaagggtgtgcttacccagaagttgggaccttggagaaggcctgttgcttacctttctaagaaacttgatccagtggctgcaggttggccaccttgtcttagaatggttgctgcaattgcagtgcttacaaaggatgctggaaagttgactatgggacaacctcttgttattttggcaccacacgctgttgaggcacttgtgaagcagccacctgataggtggttgtcaaacgcaagaatgacccattatcaagctcttcttttggatactgatagggtgcagttcggtcctgttgtggctttgaatccagcaacacttttgccacttcctgaggaaggattgcaacacaactgccttgatattttggctgaggcacatggtacaagacctgatcttaccgatcagccattgcctgatgctgatcacacttggtacacagatggatcttcacttttgcaagaaggacagaggaaggctggtgctgcagttactacagagactgaagtgatttgggctaaggcacttccagctggaacatctgctcaaagagcagagcttattgctttgacccaggcacttaagatggctgaaggaaagaagttgaacgtttacactgattctaggtatgctttcgcaacagctcatattcacggagaaatctatagaaggagaggatggttgacatcagagggaaaggaaattaagaacaaggatgaaattcttgcacttttgaaggctctttttcttcctaagagattgtctattattcattgcccaggacaccaaaagggtcattcagcagaagctaggggaaatagaatggctgatcaggctgcaagaaaggctgcaattactgagacacctgatacctctactcttttgatcgaaaactcttcaccaaattcaaggcttattaac

SEQ ID NO: 343 - DNA, 2049 bp, Synthetic construct
  source 1..2049: mol_type = other DNA
acacttaatattgaggatgaacatagattgcacgagacctctaaggaacctgatgtttctcttggatcaacttggttgtcagatttcccacaagcatgggcagagaccggaggtatgggtcttgctgttaggcaggcaccacttattattcctttgaaggcaacctctactcctgtgtcaattaagcaatatccaatgtctcaggaagctaggcttggaattaagcctcacattcaaagacttttggatcagggtattttggtgccatgtcaatcaccttggaacacaccacttttgcctgttaagaagcctggaactaatgattacagaccagtgcaagatttgagggaggttaacaagagagtggaagatattcacccaactgttccaaacccttataatcttttgtctggattgccaccttcacatcaatggtacactgtgcttgatttgaaggatgcatttttctgccttaggttggatccaacatctcagcctctttttgctttcgagtggagagatcctgaaatgggaatttctggtcaacttacatggaccaggttgcctcagggtttcaagaactcaccaaccttgtttaatgaggcacttcacagggatttggctgattttaggattcaacatcctgatcttatccttttgcagtatgttgatgatcttttgcttgctgcaacttctgaattggattgtcaacagggaactagggcattgcttcaaacacttggaaatttgggttacagagcttcagcaaagaaggctcagatttgccaaaagcaggttaagtatcttggatacttgcttaaggaaggacaaaggtggttgaccgaggctagaaaggaaactgtgatgggtcaaccaacacctaagacccctaggcagcttagagagttcttgggaaaggcaggtttttgtaggcttttcattccaggatttgctgaaatggctgcaccactttatcctttgaccaagcctggaactttgtttaactggggtccagatcaacagaaggcataccaagaaattaagcaggctttgcttactgctccagcacttggtttgcctgatcttacaaagccatttgagttgttcgttgatgaaaagcaaggatatgcaaagggtgtgcttacccagaagttgggaccttggagaaggcctgttgcttacctttctaagaaacttgatccagtggctgcaggttggccaccttgtcttagaatggttgctgcaattgcagtgcttacaaaggatgctggaaagttgactatgggacaacctcttgttattttggcaccacacgctgttgaggcacttgtgaagcagccacctgataggtggttgtcaaacgcaagaatgacccattatcaagctcttcttttggatactgatagggtgcagttcggtcctgttgtggctttgaatccagcaacacttttgccacttcctgaggaaggattgcaacacaactgccttgatattttggctgaggcacatggtacaagacctgatcttaccgatcagccattgcctgatgctgatcacacttggtacacagatggatcttcacttttgcaagaaggacagaggaaggctggtgctgcagttactacagagactgaagtgatttgggctaaggcacttccagctggaacatctgctcaaagagcagagcttattgctttgacccaggcacttaagatggctgaaggaaagaagttgaacgtttacactgattctaggtatgctttcgcaacagctcatattcacggagaaatctatagaaggagaggatggttgacatcagagggaaaggaaattaagaacaaggatgaaattcttgcacttttgaaggctctttttcttcctaagagattgtctattattcattgcccaggacaccaaaagggtcattcagcagaagctaggggaaatagaatggctgatcaggctgcaagaaaggctgcaattactgagacacctgatacctctactcttttgatcgaaaactcttcaccaaattcaaggcttattaac

SEQ ID NO: 344 - DNA, 2049 bp, Synthetic construct
  source 1..2049: mol_type = other DNA
acacttaatattgaggatgaacatagattgcacgagacctctaaggaacctgatgtttctcttggatcaacttggttgtcagatttcccacaagcatgggcagagaccggaggtatgggtcttgctgttaggcaggcaccacttattattcctttgaaggcaacctctactcctgtgtcaattaagcaatatccaatgtctcaggaagctaggcttggaattaagcctcacattcaaagacttttggatcagggtattttggtgccatgtcaatcaccttggaacacaccacttttgcctgttaagaagcctggaactaatgattacagaccagtgcaagatttgagggaggttaacaagagagtggaagatattcacccaactgttccaaacccttataatcttttgtctggattgccaccttcacatcaatggtacactgtgcttgatttgaaggatgcatttttctgccttaggttgactccaacatctcagcctctttttgctttcgagtggagagatcctgaaatgggaatttctggtcaacttacatggaccaggttgcctcagggtttcaagaactcaccaaccttgtttaatgaggcacttcacagggatttggctgattttaggattcaacatcctgatcttatccttttgcagtatgttgatgatcttttgcttgctgcaacttctgaattggattgtcaacagggaactagggcattgcttcaaacacttggaaatttgggttacagagcttcagcaaagaaggctcagatttgccaaaagcaggttaagtatcttggatacttgcttaaggaaggacaaaggtggttgaccgaggctagaaaggaaactgtgatgggtcaaccaacacctaagacccctaggcagcttagagagttcttgggaaaggcaggtttttgtaggcttttcattccaggatttgctgaaatggctgcaccactttatcctttgaccaagcctggaactttgtttaactggggtccagatcaacagaaggcataccaagaaattaagcaggctttgcttactgctccagcacttggtttgcctgatcttacaaagccatttgagttgttcgttgatgaaaagcaaggatatgcaaagggtgtgcttacccagaagttgggaccttggagaaggcctgttgcttacctttctaagaaacttgatccagtggctgcaggttggccaccttgtcttagaatggttgctgcaattgcagtgcttacaaaggatgctggaaagttgactatgggacaacctcttgttattttggcaccacacgctgttgaggcacttgtgaagcagccacctgataggtggttgtcaaacgcaagaatgacccattatcaagctcttcttttggatactgatagggtgcagttcggtcctgttgtggctttgaatccagcaacacttttgccacttcctgaggaaggattgcaacacaactgccttgatattttggctgaggcacatggtacaagacctgatcttaccgatcagccattgcctgatgctgatcacacttggtacacagatggatcttcacttttgcaagaaggacagaggaaggctggtgctgcagttactacagagactgaagtgatttgggctaaggcacttccagctggaacatctgctcaaagagcagagcttattgctttgacccaggcacttaagatggctgaaggaaagaagttgaacgtttacactgattctaggtatgctttcgcaacagctcatattcacggagaaatctatagaaggagaggatggttgacatcagagggaaaggaaattaagaacaaggatgaaattcttgcacttttgaaggctctttttcttcctaagagattgtctattattcattgcccaggacaccaaaagggtcattcagcagaagctaggggaaatagaatggctgatcaggctgcaagaaaggctgcaattactgagacacctgatacctctactcttttgatcgaaaactcttcaccaaattcaaggcttattaac

SEQ ID NO: 345 - DNA, 2049 bp, Synthetic construct
  source 1..2049: mol_type = other DNA
acacttaatattgaggatgaacatagattgcacgagacctctaaggaacctgatgtttctcttggatcaacttggttgtcagatttcccacaagcatgggcagagaccggaggtatgggtcttgctgttaggcaggcaccacttattattcctttgaaggcaacctctactcctgtgtcaattaagcaatatccaatgtctcaggaagctaggcttggaattaagcctcacattcaaagacttttggatcagggtattttggtgccatgtcaatcaccttggaacacaccacttttgcctgttaagaagcctggaactaatgattacagaccagtgcaagatttgagggaggttaacaagagagtggaagatattcacccaactgttccaaacccttataatcttttgtctggattgccaccttcacatcaatggtacactgtgcttgatttgaaggatgcatttttctgccttaggttgcatccaacatctcagcctcttgtggctttcgagtggagagatcctgaaatgggaatttctggtcaacttacatggaccaggttgcctcagggtttcaagaactcaccaaccttgtttaatgaggcacttcacagggatttggctgattttaggattcaacatcctgatcttatccttttgcagtatgttgatgatcttttgcttgctgcaacttctgaattggattgtcaacagggaactagggcattgcttcaaacacttggaaatttgggttacagagcttcagcaaagaaggctcagatttgccaaaagcaggttaagtatcttggatacttgcttaaggaaggacaaaggtggttgaccgaggctagaaaggaaactgtgatgggtcaaccaacacctaagacccctaggcagcttagagagttcttgggaaaggcaggtttttgtaggcttttcattccaggatttgctgaaatggctgcaccactttatcctttgaccaagcctggaactttgtttaactggggtccagatcaacagaaggcataccaagaaattaagcaggctttgcttactgctccagcacttggtttgcctgatcttacaaagccatttgagttgttcgttgatgaaaagcaaggatatgcaaagggtgtgcttacccagaagttgggaccttggagaaggcctgttgcttacctttctaagaaacttgatccagtggctgcaggttggccaccttgtcttagaatggttgctgcaattgcagtgcttacaaaggatgctggaaagttgactatgggacaacctcttgttattttggcaccacacgctgttgaggcacttgtgaagcagccacctgataggtggttgtcaaacgcaagaatgacccattatcaagctcttcttttggatactgatagggtgcagttcggtcctgttgtggctttgaatccagcaacacttttgccacttcctgaggaaggattgcaacacaactgccttgatattttggctgaggcacatggtacaagacctgatcttaccgatcagccattgcctgatgctgatcacacttggtacacagatggatcttcacttttgcaagaaggacagaggaaggctggtgctgcagttactacagagactgaagtgatttgggctaaggcacttccagctggaacatctgctcaaagagcagagcttattgctttgacccaggcacttaagatggctgaaggaaagaagttgaacgtttacactgattctaggtatgctttcgcaacagctcatattcacggagaaatctatagaaggagaggatggttgacatcagagggaaaggaaattaagaacaaggatgaaattcttgcacttttgaaggctctttttcttcctaagagattgtctattattcattgcccaggacaccaaaagggtcattcagcagaagctaggggaaatagaatggctgatcaggctgcaagaaaggctgcaattactgagacacctgatacctctactcttttgatcgaaaactcttcaccaaattcaaggcttattaac

SEQ ID NO: 346 - DNA, 2049 bp, Synthetic construct
  source 1..2049: mol_type = other DNA
acacttaatattgaggatgaacatagattgcacgagacctctaaggaacctgatgtttctcttggatcaacttggttgtcagatttcccacaagcatgggcagagaccggaggtatgggtcttgctgttaggcaggcaccacttattattcctttgaaggcaacctctactcctgtgtcaattaagcaatatccaatgtctcaggaagctaggcttggaattaagcctcacattcaaagacttttggatcagggtattttggtgccatgtcaatcaccttggaacacaccacttttgcctgttaagaagcctggaactaatgattacagaccagtgcaagatttgagggaggttaacaagagagtggaagatattcacccaactgttccaaacccttataatcttttgtctggattgccaccttcacatcaatggtacactgtgcttgatttgaaggatgcatttttctgccttaggttgcatccaacatctcagcctcttatggctttcgagtggagagatcctgaaatgggaatttctggtcaacttacatggaccaggttgcctcagggtttcaagaactcaccaaccttgtttaatgaggcacttcacagggatttggctgattttaggattcaacatcctgatcttatccttttgcagtatgttgatgatcttttgcttgctgcaacttctgaattggattgtcaacagggaactagggcattgcttcaaacacttggaaatttgggttacagagcttcagcaaagaaggctcagatttgccaaaagcaggttaagtatcttggatacttgcttaaggaaggacaaaggtggttgaccgaggctagaaaggaaactgtgatgggtcaaccaacacctaagacccctaggcagcttagagagttcttgggaaaggcaggtttttgtaggcttttcattccaggatttgctgaaatggctgcaccactttatcctttgaccaagcctggaactttgtttaactggggtccagatcaacagaaggcataccaagaaattaagcaggctttgcttactgctccagcacttggtttgcctgatcttacaaagccatttgagttgttcgttgatgaaaagcaaggatatgcaaagggtgtgcttacccagaagttgggaccttggagaaggcctgttgcttacctttctaagaaacttgatccagtggctgcaggttggccaccttgtcttagaatggttgctgcaattgcagtgcttacaaaggatgctggaaagttgactatgggacaacctcttgttattttggcaccacacgctgttgaggcacttgtgaagcagccacctgataggtggttgtcaaacgcaagaatgacccattatcaagctcttcttttggatactgatagggtgcagttcggtcctgttgtggctttgaatccagcaacacttttgccacttcctgaggaaggattgcaacacaactgccttgatattttggctgaggcacatggtacaagacctgatcttaccgatcagccattgcctgatgctgatcacacttggtacacagatggatcttcacttttgcaagaaggacagaggaaggctggtgctgcagttactacagagactgaagtgatttgggctaaggcacttccagctggaacatctgctcaaagagcagagcttattgctttgacccaggcacttaagatggctgaaggaaagaagttgaacgtttacactgattctaggtatgctttcgcaacagctcatattcacggagaaatctatagaaggagaggatggttgacatcagagggaaaggaaattaagaacaaggatgaaattcttgcacttttgaaggctctttttcttcctaagagattgtctattattcattgcccaggacaccaaaagggtcattcagcagaagctaggggaaatagaatggctgatcaggctgcaagaaaggctgcaattactgagacacctgatacctctactcttttgatcgaaaactcttcaccaaattcaaggcttattaac

SEQ ID NO: 347 - DNA, 2049 bp, Synthetic construct
  source 1..2049: mol_type = other DNA
acacttaatattgaggatgaacatagattgcacgagacctctaaggaacctgatgtttctcttggatcaacttggttgtcagatttcccacaagcatgggcagagaccggaggtatgggtcttgctgttaggcaggcaccacttattattcctttgaaggcaacctctactcctgtgtcaattaagcaatatccaatgtctcaggaagctaggcttggaattaagcctcacattcaaagacttttggatcagggtattttggtgccatgtcaatcaccttggaacacaccacttttgcctgttaagaagcctggaactaatgattacagaccagtgcaagatttgagggaggttaacaagagagtggaagatattcacccaactgttccaaacccttataatcttttgtctggattgccaccttcacatcaatggtacactgtgcttgatttgaaggatgcatttttctgccttaggttgcatccaacatctcagcctctttgtgctttcgagtggagagatcctgaaatgggaatttctggtcaacttacatggaccaggttgcctcagggtttcaagaactcaccaaccttgtttaatgaggcacttcacagggatttggctgattttaggattcaacatcctgatcttatccttttgcagtatgttgatgatcttttgcttgctgcaacttctgaattggattgtcaacagggaactagggcattgcttcaaacacttggaaatttgggttacagagcttcagcaaagaaggctcagatttgccaaaagcaggttaagtatcttggatacttgcttaaggaaggacaaaggtggttgaccgaggctagaaaggaaactgtgatgggtcaaccaacacctaagacccctaggcagcttagagagttcttgggaaaggcaggtttttgtaggcttttcattccaggatttgctgaaatggctgcaccactttatcctttgaccaagcctggaactttgtttaactggggtccagatcaacagaaggcataccaagaaattaagcaggctttgcttactgctccagcacttggtttgcctgatcttacaaagccatttgagttgttcgttgatgaaaagcaaggatatgcaaagggtgtgcttacccagaagttgggaccttggagaaggcctgttgcttacctttctaagaaacttgatccagtggctgcaggttggccaccttgtcttagaatggttgctgcaattgcagtgcttacaaaggatgctggaaagttgactatgggacaacctcttgttattttggcaccacacgctgttgaggcacttgtgaagcagccacctgataggtggttgtcaaacgcaagaatgacccattatcaagctcttcttttggatactgatagggtgcagttcggtcctgttgtggctttgaatccagcaacacttttgccacttcctgaggaaggattgcaacacaactgccttgatattttggctgaggcacatggtacaagacctgatcttaccgatcagccattgcctgatgctgatcacacttggtacacagatggatcttcacttttgcaagaaggacagaggaaggctggtgctgcagttactacagagactgaagtgatttgggctaaggcacttccagctggaacatctgctcaaagagcagagcttattgctttgacccaggcacttaagatggctgaaggaaagaagttgaacgtttacactgattctaggtatgctttcgcaacagctcatattcacggagaaatctatagaaggagaggatggttgacatcagagggaaaggaaattaagaacaaggatgaaattcttgcacttttgaaggctctttttcttcctaagagattgtctattattcattgcccaggacaccaaaagggtcattcagcagaagctaggggaaatagaatggctgatcaggctgcaagaaaggctgcaattactgagacacctgatacctctactcttttgatcgaaaactcttcaccaaattcaaggcttattaac

SEQ ID NO: 348 - DNA, 2049 bp, Synthetic construct
  source 1..2049: mol_type = other DNA
acacttaatattgaggatgaacatagattgcacgagacctctaaggaacctgatgtttctcttggatcaacttggttgtcagatttcccacaagcatgggcagagaccggaggtatgggtcttgctgttaggcaggcaccacttattattcctttgaaggcaacctctactcctgtgtcaattaagcaatatccaatgtctcaggaagctaggcttggaattaagcctcacattcaaagacttttggatcagggtattttggtgccatgtcaatcaccttggaacacaccacttttgcctgttaagaagcctggaactaatgattacagaccagtgcaagatttgagggaggttaacaagagagtggaagatattcacccaactgttccaaacccttataatcttttgtctggattgccaccttcacatcaatggtacactgtgcttgatttgaaggatgcatttttctgccttaggttgcatccaacatctcagcctcttcatgctttcgagtggagagatcctgaaatgggaatttctggtcaacttacatggaccaggttgcctcagggtttcaagaactcaccaaccttgtttaatgaggcacttcacagggatttggctgattttaggattcaacatcctgatcttatccttttgcagtatgttgatgatcttttgcttgctgcaacttctgaattggattgtcaacagggaactagggcattgcttcaaacacttggaaatttgggttacagagcttcagcaaagaaggctcagatttgccaaaagcaggttaagtatcttggatacttgcttaaggaaggacaaaggtggttgaccgaggctagaaaggaaactgtgatgggtcaaccaacacctaagacccctaggcagcttagagagttcttgggaaaggcaggtttttgtaggcttttcattccaggatttgctgaaatggctgcaccactttatcctttgaccaagcctggaactttgtttaactggggtccagatcaacagaaggcataccaagaaattaagcaggctttgcttactgctccagcacttggtttgcctgatcttacaaagccatttgagttgttcgttgatgaaaagcaaggatatgcaaagggtgtgcttacccagaagttgggaccttggagaaggcctgttgcttacctttctaagaaacttgatccagtggctgcaggttggccaccttgtcttagaatggttgctgcaattgcagtgcttacaaaggatgctggaaagttgactatgggacaacctcttgttattttggcaccacacgctgttgaggcacttgtgaagcagccacctgataggtggttgtcaaacgcaagaatgacccattatcaagctcttcttttggatactgatagggtgcagttcggtcctgttgtggctttgaatccagcaacacttttgccacttcctgaggaaggattgcaacacaactgccttgatattttggctgaggcacatggtacaagacctgatcttaccgatcagccattgcctgatgctgatcacacttggtacacagatggatcttcacttttgcaagaaggacagaggaaggctggtgctgcagttactacagagactgaagtgatttgggctaaggcacttccagctggaacatctgctcaaagagcagagcttattgctttgacccaggcacttaagatggctgaaggaaagaagttgaacgtttacactgattctaggtatgctttcgcaacagctcatattcacggagaaatctatagaaggagaggatggttgacatcagagggaaaggaaattaagaacaaggatgaaattcttgcacttttgaaggctctttttcttcctaagagattgtctattattcattgcccaggacaccaaaagggtcattcagcagaagctaggggaaatagaatggctgatcaggctgcaagaaaggctgcaattactgagacacctgatacctctactcttttgatcgaaaactcttcaccaaattcaaggcttattaac

SEQ ID NO: 349 - DNA, 2049 bp, Synthetic construct
  source 1..2049: mol_type = other DNA
acacttaatattgaggatgaacatagattgcacgagacctctaaggaacctgatgtttctcttggatcaacttggttgtcagatttcccacaagcatgggcagagaccggaggtatgggtcttgctgttaggcaggcaccacttattattcctttgaaggcaacctctactcctgtgtcaattaagcaatatccaatgtctcaggaagctaggcttggaattaagcctcacattcaaagacttttggatcagggtattttggtgccatgtcaatcaccttggaacacaccacttttgcctgttaagaagcctggaactaatgattacagaccagtgcaagatttgagggaggttaacaagagagtggaagatattcacccaactgttccaaacccttataatcttttgtctggattgccaccttcacatcaatggtacactgtgcttgatttgaaggatgcatttttctgccttaggttgcatccaacatctcagcctctttttgctttcaactggagagatcctgaaatgggaatttctggtcaacttacatggaccaggttgcctcagggtttcaagaactcaccaaccttgtttaatgaggcacttcacagggatttggctgattttaggattcaacatcctgatcttatccttttgcagtatgttgatgatcttttgcttgctgcaacttctgaattggattgtcaacagggaactagggcattgcttcaaacacttggaaatttgggttacagagcttcagcaaagaaggctcagatttgccaaaagcaggttaagtatcttggatacttgcttaaggaaggacaaaggtggttgaccgaggctagaaaggaaactgtgatgggtcaaccaacacctaagacccctaggcagcttagagagttcttgggaaaggcaggtttttgtaggcttttcattccaggatttgctgaaatggctgcaccactttatcctttgaccaagcctggaactttgtttaactggggtccagatcaacagaaggcataccaagaaattaagcaggctttgcttactgctccagcacttggtttgcctgatcttacaaagccatttgagttgttcgttgatgaaaagcaaggatatgcaaagggtgtgcttacccagaagttgggaccttggagaaggcctgttgcttacctttctaagaaacttgatccagtggctgcaggttggccaccttgtcttagaatggttgctgcaattgcagtgcttacaaaggatgctggaaagttgactatgggacaacctcttgttattttggcaccacacgctgttgaggcacttgtgaagcagccacctgataggtggttgtcaaacgcaagaatgacccattatcaagctcttcttttggatactgatagggtgcagttcggtcctgttgtggctttgaatccagcaacacttttgccacttcctgaggaaggattgcaacacaactgccttgatattttggctgaggcacatggtacaagacctgatcttaccgatcagccattgcctgatgctgatcacacttggtacacagatggatcttcacttttgcaagaaggacagaggaaggctggtgctgcagttactacagagactgaagtgatttgggctaaggcacttccagctggaacatctgctcaaagagcagagcttattgctttgacccaggcacttaagatggctgaaggaaagaagttgaacgtttacactgattctaggtatgctttcgcaacagctcatattcacggagaaatctatagaaggagaggatggttgacatcagagggaaaggaaattaagaacaaggatgaaattcttgcacttttgaaggctctttttcttcctaagagattgtctattattcattgcccaggacaccaaaagggtcattcagcagaagctaggggaaatagaatggctgatcaggctgcaagaaaggctgcaattactgagacacctgatacctctactcttttgatcgaaaactcttcaccaaattcaaggcttattaac

SEQ ID NO: 350 - DNA, 2049 bp, Synthetic construct
  source 1..2049: mol_type = other DNA
acacttaatattgaggatgaacatagattgcacgagacctctaaggaacctgatgtttctcttggatcaacttggttgtcagatttcccacaagcatgggcagagaccggaggtatgggtcttgctgttaggcaggcaccacttattattcctttgaaggcaacctctactcctgtgtcaattaagcaatatccaatgtctcaggaagctaggcttggaattaagcctcacattcaaagacttttggatcagggtattttggtgccatgtcaatcaccttggaacacaccacttttgcctgttaagaagcctggaactaatgattacagaccagtgcaagatttgagggaggttaacaagagagtggaagatattcacccaactgttccaaacccttataatcttttgtctggattgccaccttcacatcaatggtacactgtgcttgatttgaaggatgcatttttctgccttaggttgcatccaacatctcagcctctttttgctttcgtgtggagagatcctgaaatgggaatttctggtcaacttacatggaccaggttgcctcagggtttcaagaactcaccaaccttgtttaatgaggcacttcacagggatttggctgattttaggattcaacatcctgatcttatccttttgcagtatgttgatgatcttttgcttgctgcaacttctgaattggattgtcaacagggaactagggcattgcttcaaacacttggaaatttgggttacagagcttcagcaaagaaggctcagatttgccaaaagcaggttaagtatcttggatacttgcttaaggaaggacaaaggtggttgaccgaggctagaaaggaaactgtgatgggtcaaccaacacctaagacccctaggcagcttagagagttcttgggaaaggcaggtttttgtaggcttttcattccaggatttgctgaaatggctgcaccactttatcctttgaccaagcctggaactttgtttaactggggtccagatcaacagaaggcataccaagaaattaagcaggctttgcttactgctccagcacttggtttgcctgatcttacaaagccatttgagttgttcgttgatgaaaagcaaggatatgcaaagggtgtgcttacccagaagttgggaccttggagaaggcctgttgcttacctttctaagaaacttgatccagtggctgcaggttggccaccttgtcttagaatggttgctgcaattgcagtgcttacaaaggatgctggaaagttgactatgggacaacctcttgttattttggcaccacacgctgttgaggcacttgtgaagcagccacctgataggtggttgtcaaacgcaagaatgacccattatcaagctcttcttttggatactgatagggtgcagttcggtcctgttgtggctttgaatccagcaacacttttgccacttcctgaggaaggattgcaacacaactgccttgatattttggctgaggcacatggtacaagacctgatcttaccgatcagccattgcctgatgctgatcacacttggtacacagatggatcttcacttttgcaagaaggacagaggaaggctggtgctgcagttactacagagactgaagtgatttgggctaaggcacttccagctggaacatctgctcaaagagcagagcttattgctttgacccaggcacttaagatggctgaaggaaagaagttgaacgtttacactgattctaggtatgctttcgcaacagctcatattcacggagaaatctatagaaggagaggatggttgacatcagagggaaaggaaattaagaacaaggatgaaattcttgcacttttgaaggctctttttcttcctaagagattgtctattattcattgcccaggacaccaaaagggtcattcagcagaagctaggggaaatagaatggctgatcaggctgcaagaaaggctgcaattactgagacacctgatacctctactcttttgatcgaaaactcttcaccaaattcaaggcttattaac

SEQ ID NO: 351 - DNA, 2049 bp, Synthetic construct
  source 1..2049: mol_type = other DNA
acacttaatattgaggatgaacatagattgcacgagacctctaaggaacctgatgtttctcttggatcaacttggttgtcagatttcccacaagcatgggcagagaccggaggtatgggtcttgctgttaggcaggcaccacttattattcctttgaaggcaacctctactcctgtgtcaattaagcaatatccaatgtctcaggaagctaggcttggaattaagcctcacattcaaagacttttggatcagggtattttggtgccatgtcaatcaccttggaacacaccacttttgcctgttaagaagcctggaactaatgattacagaccagtgcaagatttgagggaggttaacaagagagtggaagatattcacccaactgttccaaacccttataatcttttgtctggattgccaccttcacatcaatggtacactgtgcttgatttgaaggatgcatttttctgccttaggttgcatccaacatctcagcctctttttgctttcgattggagagatcctgaaatgggaatttctggtcaacttacatggaccaggttgcctcagggtttcaagaactcaccaaccttgtttaatgaggcacttcacagggatttggctgattttaggattcaacatcctgatcttatccttttgcagtatgttgatgatcttttgcttgctgcaacttctgaattggattgtcaacagggaactagggcattgcttcaaacacttggaaatttgggttacagagcttcagcaaagaaggctcagatttgccaaaagcaggttaagtatcttggatacttgcttaaggaaggacaaaggtggttgaccgaggctagaaaggaaactgtgatgggtcaaccaacacctaagacccctaggcagcttagagagttcttgggaaaggcaggtttttgtaggcttttcattccaggatttgctgaaatggctgcaccactttatcctttgaccaagcctggaactttgtttaactggggtccagatcaacagaaggcataccaagaaattaagcaggctttgcttactgctccagcacttggtttgcctgatcttacaaagccatttgagttgttcgttgatgaaaagcaaggatatgcaaagggtgtgcttacccagaagttgggaccttggagaaggcctgttgcttacctttctaagaaacttgatccagtggctgcaggttggccaccttgtcttagaatggttgctgcaattgcagtgcttacaaaggatgctggaaagttgactatgggacaacctcttgttattttggcaccacacgctgttgaggcacttgtgaagcagccacctgataggtggttgtcaaacgcaagaatgacccattatcaagctcttcttttggatactgatagggtgcagttcggtcctgttgtggctttgaatccagcaacacttttgccacttcctgaggaaggattgcaacacaactgccttgatattttggctgaggcacatggtacaagacctgatcttaccgatcagccattgcctgatgctgatcacacttggtacacagatggatcttcacttttgcaagaaggacagaggaaggctggtgctgcagttactacagagactgaagtgatttgggctaaggcacttccagctggaacatctgctcaaagagcagagcttattgctttgacccaggcacttaagatggctgaaggaaagaagttgaacgtttacactgattctaggtatgctttcgcaacagctcatattcacggagaaatctatagaaggagaggatggttgacatcagagggaaaggaaattaagaacaaggatgaaattcttgcacttttgaaggctctttttcttcctaagagattgtctattattcattgcccaggacaccaaaagggtcattcagcagaagctaggggaaatagaatggctgatcaggctgcaagaaaggctgcaattactgagacacctgatacctctactcttttgatcgaaaactcttcaccaaattcaaggcttattaac

SEQ ID NO: 352 - DNA, 2049 bp, Synthetic construct
  source 1..2049: mol_type = other DNA
acacttaatattgaggatgaacatagattgcacgagacctctaaggaacctgatgtttctcttggatcaacttggttgtcagatttcccacaagcatgggcagagaccggaggtatgggtcttgctgttaggcaggcaccacttattattcctttgaaggcaacctctactcctgtgtcaattaagcaatatccaatgtctcaggaagctaggcttggaattaagcctcacattcaaagacttttggatcagggtattttggtgccatgtcaatcaccttggaacacaccacttttgcctgttaagaagcctggaactaatgattacagaccagtgcaagatttgagggaggttaacaagagagtggaagatattcacccaactgttccaaacccttataatcttttgtctggattgccaccttcacatcaatggtacactgtgcttgatttgaaggatgcatttttctgccttaggttgcatccaacatctcagcctctttttgctttctactggagagatcctgaaatgggaatttctggtcaacttacatggaccaggttgcctcagggtttcaagaactcaccaaccttgtttaatgaggcacttcacagggatttggctgattttaggattcaacatcctgatcttatccttttgcagtatgttgatgatcttttgcttgctgcaacttctgaattggattgtcaacagggaactagggcattgcttcaaacacttggaaatttgggttacagagcttcagcaaagaaggctcagatttgccaaaagcaggttaagtatcttggatacttgcttaaggaaggacaaaggtggttgaccgaggctagaaaggaaactgtgatgggtcaaccaacacctaagacccctaggcagcttagagagttcttgggaaaggcaggtttttgtaggcttttcattccaggatttgctgaaatggctgcaccactttatcctttgaccaagcctggaactttgtttaactggggtccagatcaacagaaggcataccaagaaattaagcaggctttgcttactgctccagcacttggtttgcctgatcttacaaagccatttgagttgttcgttgatgaaaagcaaggatatgcaaagggtgtgcttacccagaagttgggaccttggagaaggcctgttgcttacctttctaagaaacttgatccagtggctgcaggttggccaccttgtcttagaatggttgctgcaattgcagtgcttacaaaggatgctggaaagttgactatgggacaacctcttgttattttggcaccacacgctgttgaggcacttgtgaagcagccacctgataggtggttgtcaaacgcaagaatgacccattatcaagctcttcttttggatactgatagggtgcagttcggtcctgttgtggctttgaatccagcaacacttttgccacttcctgaggaaggattgcaacacaactgccttgatattttggctgaggcacatggtacaagacctgatcttaccgatcagccattgcctgatgctgatcacacttggtacacagatggatcttcacttttgcaagaaggacagaggaaggctggtgctgcagttactacagagactgaagtgatttgggctaaggcacttccagctggaacatctgctcaaagagcagagcttattgctttgacccaggcacttaagatggctgaaggaaagaagttgaacgtttacactgattctaggtatgctttcgcaacagctcatattcacggagaaatctatagaaggagaggatggttgacatcagagggaaaggaaattaagaacaaggatgaaattcttgcacttttgaaggctctttttcttcctaagagattgtctattattcattgcccaggacaccaaaagggtcattcagcagaagctaggggaaatagaatggctgatcaggctgcaagaaaggctgcaattactgagacacctgatacctctactcttttgatcgaaaactcttcaccaaattcaaggcttattaac

SEQ ID NO: 353 - DNA, 2049 bp, Synthetic construct
  source 1..2049: mol_type = other DNA
acacttaatattgaggatgaacatagattgcacgagacctctaaggaacctgatgtttctcttggatcaacttggttgtcagatttcccacaagcatgggcagagaccggaggtatgggtcttgctgttaggcaggcaccacttattattcctttgaaggcaacctctactcctgtgtcaattaagcaatatccaatgtctcaggaagctaggcttggaattaagcctcacattcaaagacttttggatcagggtattttggtgccatgtcaatcaccttggaacacaccacttttgcctgttaagaagcctggaactaatgattacagaccagtgcaagatttgagggaggttaacaagagagtggaagatattcacccaactgttccaaacccttataatcttttgtctggattgccaccttcacatcaatggtacactgtgcttgatttgaaggatgcatttttctgccttaggttgcatccaacatctcagcctctttttgctttcttttggagagatcctgaaatgggaatttctggtcaacttacatggaccaggttgcctcagggtttcaagaactcaccaaccttgtttaatgaggcacttcacagggatttggctgattttaggattcaacatcctgatcttatccttttgcagtatgttgatgatcttttgcttgctgcaacttctgaattggattgtcaacagggaactagggcattgcttcaaacacttggaaatttgggttacagagcttcagcaaagaaggctcagatttgccaaaagcaggttaagtatcttggatacttgcttaaggaaggacaaaggtggttgaccgaggctagaaaggaaactgtgatgggtcaaccaacacctaagacccctaggcagcttagagagttcttgggaaaggcaggtttttgtaggcttttcattccaggatttgctgaaatggctgcaccactttatcctttgaccaagcctggaactttgtttaactggggtccagatcaacagaaggcataccaagaaattaagcaggctttgcttactgctccagcacttggtttgcctgatcttacaaagccatttgagttgttcgttgatgaaaagcaaggatatgcaaagggtgtgcttacccagaagttgggaccttggagaaggcctgttgcttacctttctaagaaacttgatccagtggctgcaggttggccaccttgtcttagaatggttgctgcaattgcagtgcttacaaaggatgctggaaagttgactatgggacaacctcttgttattttggcaccacacgctgttgaggcacttgtgaagcagccacctgataggtggttgtcaaacgcaagaatgacccattatcaagctcttcttttggatactgatagggtgcagttcggtcctgttgtggctttgaatccagcaacacttttgccacttcctgaggaaggattgcaacacaactgccttgatattttggctgaggcacatggtacaagacctgatcttaccgatcagccattgcctgatgctgatcacacttggtacacagatggatcttcacttttgcaagaaggacagaggaaggctggtgctgcagttactacagagactgaagtgatttgggctaaggcacttccagctggaacatctgctcaaagagcagagcttattgctttgacccaggcacttaagatggctgaaggaaagaagttgaacgtttacactgattctaggtatgctttcgcaacagctcatattcacggagaaatctatagaaggagaggatggttgacatcagagggaaaggaaattaagaacaaggatgaaattcttgcacttttgaaggctctttttcttcctaagagattgtctattattcattgcccaggacaccaaaagggtcattcagcagaagctaggggaaatagaatggctgatcaggctgcaagaaaggctgcaattactgagacacctgatacctctactcttttgatcgaaaactcttcaccaaattcaaggcttattaac

SEQ ID NO: 354 - DNA, 2049 bp, Synthetic construct
  source 1..2049: mol_type = other DNA
acacttaatattgaggatgaacatagattgcacgagacctctaaggaacctgatgtttctcttggatcaacttggttgtcagatttcccacaagcatgggcagagaccggaggtatgggtcttgctgttaggcaggcaccacttattattcctttgaaggcaacctctactcctgtgtcaattaagcaatatccaatgtctcaggaagctaggcttggaattaagcctcacattcaaagacttttggatcagggtattttggtgccatgtcaatcaccttggaacacaccacttttgcctgttaagaagcctggaactaatgattacagaccagtgcaagatttgagggaggttaacaagagagtggaagatattcacccaactgttccaaacccttataatcttttgtctggaggaccaccttcacatcaatggtacactgtgcttgatttgaaggatgcatttttctgccttaggttgcatccaacatctcagcctctttttgctttcgagtggagagatcctgaaatgggaatttctggtcaacttacatggaccaggttgcctcagggtttcaagaactcaccaaccttgtttaatgaggcacttcacagggatttggctgattttaggattcaacatcctgatcttatccttttgcagtatgttgatgatcttttgcttgctgcaacttctgaattggattgtcaacagggaactagggcattgcttcaaacacttggaaatttgggttacagagcttcagcaaagaaggctcagatttgccaaaagcaggttaagtatcttggatacttgcttaaggaaggacaaaggtggttgaccgaggctagaaaggaaactgtgatgggtcaaccaacacctaagacccctaggcagcttagagagttcttgggaaaggcaggtttttgtaggcttttcattccaggatttgctgaaatggctgcaccactttatcctttgaccaagcctggaactttgtttaactggggtccagatcaacagaaggcataccaagaaattaagcaggctttgcttactgctccagcacttggtttgcctgatcttacaaagccatttgagttgttcgttgatgaaaagcaaggatatgcaaagggtgtgcttacccagaagttgggaccttggagaaggcctgttgcttacctttctaagaaacttgatccagtggctgcaggttggccaccttgtcttagaatggttgctgcaattgcagtgcttacaaaggatgctggaaagttgactatgggacaacctcttgttattttggcaccacacgctgttgaggcacttgtgaagcagccacctgataggtggttgtcaaacgcaagaatgacccattatcaagctcttcttttggatactgatagggtgcagttcggtcctgttgtggctttgaatccagcaacacttttgccacttcctgaggaaggattgcaacacaactgccttgatattttggctgaggcacatggtacaagacctgatcttaccgatcagccattgcctgatgctgatcacacttggtacacagatggatcttcacttttgcaagaaggacagaggaaggctggtgctgcagttactacagagactgaagtgatttgggctaaggcacttccagctggaacatctgctcaaagagcagagcttattgctttgacccaggcacttaagatggctgaaggaaagaagttgaacgtttacactgattctaggtatgctttcgcaacagctcatattcacggagaaatctatagaaggagaggatggttgacatcagagggaaaggaaattaagaacaaggatgaaattcttgcacttttgaaggctctttttcttcctaagagattgtctattattcattgcccaggacaccaaaagggtcattcagcagaagctaggggaaatagaatggctgatcaggctgcaagaaaggctgcaattactgagacacctgatacctctactcttttgatcgaaaactcttcaccaaattcaaggcttattaac

SEQ ID NO: 355 - DNA, 2049 bp, Synthetic construct
  source 1..2049: mol_type = other DNA
acacttaatattgaggatgaacatagattgcacgagacctctaaggaacctgatgtttctcttggatcaacttggttgtcagatttcccacaagcatgggcagagaccggaggtatgggtcttgctgttaggcaggcaccacttattattcctttgaaggcaacctctactcctgtgtcaattaagcaatatccaatgtctcaggaagctaggcttggaattaagcctcacattcaaagacttttggatcagggtattttggtgccatgtcaatcaccttggaacacaccacttttgcctgttaagaagcctggaactaatgattacagaccagtgcaagatttgagggaggttaacaagagagtggaagatattcacccaactgttccaaacccttataatcttttgtctggatacccaccttcacatcaatggtacactgtgcttgatttgaaggatgcatttttctgccttaggttgcatccaacatctcagcctctttttgctttcgagtggagagatcctgaaatgggaatttctggtcaacttacatggaccaggttgcctcagggtttcaagaactcaccaaccttgtttaatgaggcacttcacagggatttggctgattttaggattcaacatcctgatcttatccttttgcagtatgttgatgatcttttgcttgctgcaacttctgaattggattgtcaacagggaactagggcattgcttcaaacacttggaaatttgggttacagagcttcagcaaagaaggctcagatttgccaaaagcaggttaagtatcttggatacttgcttaaggaaggacaaaggtggttgaccgaggctagaaaggaaactgtgatgggtcaaccaacacctaagacccctaggcagcttagagagttcttgggaaaggcaggtttttgtaggcttttcattccaggatttgctgaaatggctgcaccactttatcctttgaccaagcctggaactttgtttaactggggtccagatcaacagaaggcataccaagaaattaagcaggctttgcttactgctccagcacttggtttgcctgatcttacaaagccatttgagttgttcgttgatgaaaagcaaggatatgcaaagggtgtgcttacccagaagttgggaccttggagaaggcctgttgcttacctttctaagaaacttgatccagtggctgcaggttggccaccttgtcttagaatggttgctgcaattgcagtgcttacaaaggatgctggaaagttgactatgggacaacctcttgttattttggcaccacacgctgttgaggcacttgtgaagcagccacctgataggtggttgtcaaacgcaagaatgacccattatcaagctcttcttttggatactgatagggtgcagttcggtcctgttgtggctttgaatccagcaacacttttgccacttcctgaggaaggattgcaacacaactgccttgatattttggctgaggcacatggtacaagacctgatcttaccgatcagccattgcctgatgctgatcacacttggtacacagatggatcttcacttttgcaagaaggacagaggaaggctggtgctgcagttactacagagactgaagtgatttgggctaaggcacttccagctggaacatctgctcaaagagcagagcttattgctttgacccaggcacttaagatggctgaaggaaagaagttgaacgtttacactgattctaggtatgctttcgcaacagctcatattcacggagaaatctatagaaggagaggatggttgacatcagagggaaaggaaattaagaacaaggatgaaattcttgcacttttgaaggctctttttcttcctaagagattgtctattattcattgcccaggacaccaaaagggtcattcagcagaagctaggggaaatagaatggctgatcaggctgcaagaaaggctgcaattactgagacacctgatacctctactcttttgatcgaaaactcttcaccaaattcaaggcttattaac

SEQ ID NO: 356 - DNA, 2049 bp, Synthetic construct
  source 1..2049: mol_type = other DNA
acacttaatattgaggatgaacatagattgcacgagacctctaaggaacctgatgtttctcttggatcaacttggttgtcagatttcccacaagcatgggcagagaccggaggtatgggtcttgctgttaggcaggcaccacttattattcctttgaaggcaacctctactcctgtgtcaattaagcaatatccaatgtctcaggaagctaggcttggaattaagcctcacattcaaagacttttggatcagggtattttggtgccatgtcaatcaccttggaacacaccacttttgcctgttaagaagcctggaactaatgattacagaccagtgcaagatttgagggaggttaacaagagagtggaagatattcacccaactgttccaaacccttataatcttttgtctggatttccaccttcacatcaatggtacactgtgcttgatttgaaggatgcatttttctgccttaggttgcatccaacatctcagcctctttttgctttcgagtggagagatcctgaaatgggaatttctggtcaacttacatggaccaggttgcctcagggtttcaagaactcaccaaccttgtttaatgaggcacttcacagggatttggctgattttaggattcaacatcctgatcttatccttttgcagtatgttgatgatcttttgcttgctgcaacttctgaattggattgtcaacagggaactagggcattgcttcaaacacttggaaatttgggttacagagcttcagcaaagaaggctcagatttgccaaaagcaggttaagtatcttggatacttgcttaaggaaggacaaaggtggttgaccgaggctagaaaggaaactgtgatgggtcaaccaacacctaagacccctaggcagcttagagagttcttgggaaaggcaggtttttgtaggcttttcattccaggatttgctgaaatggctgcaccactttatcctttgaccaagcctggaactttgtttaactggggtccagatcaacagaaggcataccaagaaattaagcaggctttgcttactgctccagcacttggtttgcctgatcttacaaagccatttgagttgttcgttgatgaaaagcaaggatatgcaaagggtgtgcttacccagaagttgggaccttggagaaggcctgttgcttacctttctaagaaacttgatccagtggctgcaggttggccaccttgtcttagaatggttgctgcaattgcagtgcttacaaaggatgctggaaagttgactatgggacaacctcttgttattttggcaccacacgctgttgaggcacttgtgaagcagccacctgataggtggttgtcaaacgcaagaatgacccattatcaagctcttcttttggatactgatagggtgcagttcggtcctgttgtggctttgaatccagcaacacttttgccacttcctgaggaaggattgcaacacaactgccttgatattttggctgaggcacatggtacaagacctgatcttaccgatcagccattgcctgatgctgatcacacttggtacacagatggatcttcacttttgcaagaaggacagaggaaggctggtgctgcagttactacagagactgaagtgatttgggctaaggcacttccagctggaacatctgctcaaagagcagagcttattgctttgacccaggcacttaagatggctgaaggaaagaagttgaacgtttacactgattctaggtatgctttcgcaacagctcatattcacggagaaatctatagaaggagaggatggttgacatcagagggaaaggaaattaagaacaaggatgaaattcttgcacttttgaaggctctttttcttcctaagagattgtctattattcattgcccaggacaccaaaagggtcattcagcagaagctaggggaaatagaatggctgatcaggctgcaagaaaggctgcaattactgagacacctgatacctctactcttttgatcgaaaactcttcaccaaattcaaggcttattaac

SEQ ID NO: 357 - DNA, 2049 bp, Synthetic construct
  source 1..2049: mol_type = other DNA
acacttaatattgaggatgaacatagattgcacgagacctctaaggaacctgatgtttctcttggatcaacttggttgtcagatttcccacaagcatgggcagagaccggaggtatgggtcttgctgttaggcaggcaccacttattattcctttgaaggcaacctctactcctgtgtcaattaagcaatatccaatgtctcaggaagctaggcttggaattaagcctcacattcaaagacttttggatcagggtattttggtgccatgtcaatcaccttggaacacaccacttttgcctgttaagaagcctggaactaatgattacagaccagtgcaagatttgagggaggttaacaagagagtggaagatattcacccaactgttccaaacccttataatcttttgtctggagcaccaccttcacatcaatggtacactgtgcttgatttgaaggatgcatttttctgccttaggttgcatccaacatctcagcctctttttgctttcgagtggagagatcctgaaatgggaatttctggtcaacttacatggaccaggttgcctcagggtttcaagaactcaccaaccttgtttaatgaggcacttcacagggatttggctgattttaggattcaacatcctgatcttatccttttgcagtatgttgatgatcttttgcttgctgcaacttctgaattggattgtcaacagggaactagggcattgcttcaaacacttggaaatttgggttacagagcttcagcaaagaaggctcagatttgccaaaagcaggttaagtatcttggatacttgcttaaggaaggacaaaggtggttgaccgaggctagaaaggaaactgtgatgggtcaaccaacacctaagacccctaggcagcttagagagttcttgggaaaggcaggtttttgtaggcttttcattccaggatttgctgaaatggctgcaccactttatcctttgaccaagcctggaactttgtttaactggggtccagatcaacagaaggcataccaagaaattaagcaggctttgcttactgctccagcacttggtttgcctgatcttacaaagccatttgagttgttcgttgatgaaaagcaaggatatgcaaagggtgtgcttacccagaagttgggaccttggagaaggcctgttgcttacctttctaagaaacttgatccagtggctgcaggttggccaccttgtcttagaatggttgctgcaattgcagtgcttacaaaggatgctggaaagttgactatgggacaacctcttgttattttggcaccacacgctgttgaggcacttgtgaagcagccacctgataggtggttgtcaaacgcaagaatgacccattatcaagctcttcttttggatactgatagggtgcagttcggtcctgttgtggctttgaatccagcaacacttttgccacttcctgaggaaggattgcaacacaactgccttgatattttggctgaggcacatggtacaagacctgatcttaccgatcagccattgcctgatgctgatcacacttggtacacagatggatcttcacttttgcaagaaggacagaggaaggctggtgctgcagttactacagagactgaagtgatttgggctaaggcacttccagctggaacatctgctcaaagagcagagcttattgctttgacccaggcacttaagatggctgaaggaaagaagttgaacgtttacactgattctaggtatgctttcgcaacagctcatattcacggagaaatctatagaaggagaggatggttgacatcagagggaaaggaaattaagaacaaggatgaaattcttgcacttttgaaggctctttttcttcctaagagattgtctattattcattgcccaggacaccaaaagggtcattcagcagaagctaggggaaatagaatggctgatcaggctgcaagaaaggctgcaattactgagacacctgatacctctactcttttgatcgaaaactcttcaccaaattcaaggcttattaac

SEQ ID NO: 358 - DNA, 2049 bp, Synthetic construct
  source 1..2049: mol_type = other DNA
acacttaatattgaggatgaacatagattgcacgagacctctaaggaacctgatgtttctcttggatcaacttggttgtcagatttcccacaagcatgggcagagaccggaggtatgggtcttgctgttaggcaggcaccacttattattcctttgaaggcaacctctactcctgtgtcaattaagcaatatccaatgtctcaggaagctaggcttggaattaagcctcacattcaaagacttttggatcagggtattttggtgccatgtcaatcaccttggaacacaccacttttgcctgttaagaagcctggaactaatgattacagaccagtgcaagatttgagggaggttaacaagagagtggaagatattcacccaactgttccaaacccttataatcttttgtctggaattccaccttcacatcaatggtacactgtgcttgatttgaaggatgcatttttctgccttaggttgcatccaacatctcagcctctttttgctttcgagtggagagatcctgaaatgggaatttctggtcaacttacatggaccaggttgcctcagggtttcaagaactcaccaaccttgtttaatgaggcacttcacagggatttggctgattttaggattcaacatcctgatcttatccttttgcagtatgttgatgatcttttgcttgctgcaacttctgaattggattgtcaacagggaactagggcattgcttcaaacacttggaaatttgggttacagagcttcagcaaagaaggctcagatttgccaaaagcaggttaagtatcttggatacttgcttaaggaaggacaaaggtggttgaccgaggctagaaaggaaactgtgatgggtcaaccaacacctaagacccctaggcagcttagagagttcttgggaaaggcaggtttttgtaggcttttcattccaggatttgctgaaatggctgcaccactttatcctttgaccaagcctggaactttgtttaactggggtccagatcaacagaaggcataccaagaaattaagcaggctttgcttactgctccagcacttggtttgcctgatcttacaaagccatttgagttgttcgttgatgaaaagcaaggatatgcaaagggtgtgcttacccagaagttgggaccttggagaaggcctgttgcttacctttctaagaaacttgatccagtggctgcaggttggccaccttgtcttagaatggttgctgcaattgcagtgcttacaaaggatgctggaaagttgactatgggacaacctcttgttattttggcaccacacgctgttgaggcacttgtgaagcagccacctgataggtggttgtcaaacgcaagaatgacccattatcaagctcttcttttggatactgatagggtgcagttcggtcctgttgtggctttgaatccagcaacacttttgccacttcctgaggaaggattgcaacacaactgccttgatattttggctgaggcacatggtacaagacctgatcttaccgatcagccattgcctgatgctgatcacacttggtacacagatggatcttcacttttgcaagaaggacagaggaaggctggtgctgcagttactacagagactgaagtgatttgggctaaggcacttccagctggaacatctgctcaaagagcagagcttattgctttgacccaggcacttaagatggctgaaggaaagaagttgaacgtttacactgattctaggtatgctttcgcaacagctcatattcacggagaaatctatagaaggagaggatggttgacatcagagggaaaggaaattaagaacaaggatgaaattcttgcacttttgaaggctctttttcttcctaagagattgtctattattcattgcccaggacaccaaaagggtcattcagcagaagctaggggaaatagaatggctgatcaggctgcaagaaaggctgcaattactgagacacctgatacctctactcttttgatcgaaaactcttcaccaaattcaaggcttattaac

SEQ ID NO: 359 - DNA, 2049 bp, Synthetic construct
  source 1..2049: mol_type = other DNA
acacttaatattgaggatgaacatagattgcacgagacctctaaggaacctgatgtttctcttggatcaacttggttgtcagatttcccacaagcatgggcagagaccggaggtatgggtcttgctgttaggcaggcaccacttattattcctttgaaggcaacctctactcctgtgtcaattaagcaatatccaatgtctcaggaagctaggcttggaattaagcctcacattcaaagacttttggatcagggtattttggtgccatgtcaatcaccttggaacacaccacttttgcctgttaagaagcctggaactaatgattacagaccagtgcaagatttgagggaggttaacaagagagtggaagatattcacccaactgttccaaacccttataatcttttgtctggatgcccaccttcacatcaatggtacactgtgcttgatttgaaggatgcatttttctgccttaggttgcatccaacatctcagcctctttttgctttcgagtggagagatcctgaaatgggaatttctggtcaacttacatggaccaggttgcctcagggtttcaagaactcaccaaccttgtttaatgaggcacttcacagggatttggctgattttaggattcaacatcctgatcttatccttttgcagtatgttgatgatcttttgcttgctgcaacttctgaattggattgtcaacagggaactagggcattgcttcaaacacttggaaatttgggttacagagcttcagcaaagaaggctcagatttgccaaaagcaggttaagtatcttggatacttgcttaaggaaggacaaaggtggttgaccgaggctagaaaggaaactgtgatgggtcaaccaacacctaagacccctaggcagcttagagagttcttgggaaaggcaggtttttgtaggcttttcattccaggatttgctgaaatggctgcaccactttatcctttgaccaagcctggaactttgtttaactggggtccagatcaacagaaggcataccaagaaattaagcaggctttgcttactgctccagcacttggtttgcctgatcttacaaagccatttgagttgttcgttgatgaaaagcaaggatatgcaaagggtgtgcttacccagaagttgggaccttggagaaggcctgttgcttacctttctaagaaacttgatccagtggctgcaggttggccaccttgtcttagaatggttgctgcaattgcagtgcttacaaaggatgctggaaagttgactatgggacaacctcttgttattttggcaccacacgctgttgaggcacttgtgaagcagccacctgataggtggttgtcaaacgcaagaatgacccattatcaagctcttcttttggatactgatagggtgcagttcggtcctgttgtggctttgaatccagcaacacttttgccacttcctgaggaaggattgcaacacaactgccttgatattttggctgaggcacatggtacaagacctgatcttaccgatcagccattgcctgatgctgatcacacttggtacacagatggatcttcacttttgcaagaaggacagaggaaggctggtgctgcagttactacagagactgaagtgatttgggctaaggcacttccagctggaacatctgctcaaagagcagagcttattgctttgacccaggcacttaagatggctgaaggaaagaagttgaacgtttacactgattctaggtatgctttcgcaacagctcatattcacggagaaatctatagaaggagaggatggttgacatcagagggaaaggaaattaagaacaaggatgaaattcttgcacttttgaaggctctttttcttcctaagagattgtctattattcattgcccaggacaccaaaagggtcattcagcagaagctaggggaaatagaatggctgatcaggctgcaagaaaggctgcaattactgagacacctgatacctctactcttttgatcgaaaactcttcaccaaattcaaggcttattaac

SEQ ID NO: 360 - DNA, 2049 bp, Synthetic construct
  source 1..2049: mol_type = other DNA
acacttaatattgaggatgaacatagattgcacgagacctctaaggaacctgatgtttctcttggatcaacttggttgtcagatttcccacaagcatgggcagagaccggaggtatgggtcttgctgttaggcaggcaccacttattattcctttgaaggcaacctctactcctgtgtcaattaagcaatatccaatgtctcaggaagctaggcttggaattaagcctcacattcaaagacttttggatcagggtattttggtgccatgtcaatcaccttggaacacaccacttttgcctgttaagaagcctggaactaatgattacagaccagtgcaagatttgagggaggttaacaagagagtggaagatattcacccaactgttccaaacccttataatcttttgtctggattgccaccttcacatcaatggtacactgtgcttgatttgaaggatgcatttttctgccttaggttgcatccaacatctcagcctctttttgctttcgagtggagagatcctgaaatgggaatttctggtcaacttacatggaccaggttgcctcagggtttcaagaactcaccaaccttgtttaatgaggcacttcacagggatttggctgattttaggattcaacatcctgatcttatccttttgcagtattgtgatgatcttttgcttgctgcaacttctgaattggattgtcaacagggaactagggcattgcttcaaacacttggaaatttgggttacagagcttcagcaaagaaggctcagatttgccaaaagcaggttaagtatcttggatacttgcttaaggaaggacaaaggtggttgaccgaggctagaaaggaaactgtgatgggtcaaccaacacctaagacccctaggcagcttagagagttcttgggaaaggcaggtttttgtaggcttttcattccaggatttgctgaaatggctgcaccactttatcctttgaccaagcctggaactttgtttaactggggtccagatcaacagaaggcataccaagaaattaagcaggctttgcttactgctccagcacttggtttgcctgatcttacaaagccatttgagttgttcgttgatgaaaagcaaggatatgcaaagggtgtgcttacccagaagttgggaccttggagaaggcctgttgcttacctttctaagaaacttgatccagtggctgcaggttggccaccttgtcttagaatggttgctgcaattgcagtgcttacaaaggatgctggaaagttgactatgggacaacctcttgttattttggcaccacacgctgttgaggcacttgtgaagcagccacctgataggtggttgtcaaacgcaagaatgacccattatcaagctcttcttttggatactgatagggtgcagttcggtcctgttgtggctttgaatccagcaacacttttgccacttcctgaggaaggattgcaacacaactgccttgatattttggctgaggcacatggtacaagacctgatcttaccgatcagccattgcctgatgctgatcacacttggtacacagatggatcttcacttttgcaagaaggacagaggaaggctggtgctgcagttactacagagactgaagtgatttgggctaaggcacttccagctggaacatctgctcaaagagcagagcttattgctttgacccaggcacttaagatggctgaaggaaagaagttgaacgtttacactgattctaggtatgctttcgcaacagctcatattcacggagaaatctatagaaggagaggatggttgacatcagagggaaaggaaattaagaacaaggatgaaattcttgcacttttgaaggctctttttcttcctaagagattgtctattattcattgcccaggacaccaaaagggtcattcagcagaagctaggggaaatagaatggctgatcaggctgcaagaaaggctgcaattactgagacacctgatacctctactcttttgatcgaaaactcttcaccaaattcaaggcttattaac

SEQ ID NO: 361 - DNA, 2049 bp, Synthetic construct
  source 1..2049: mol_type = other DNA
acacttaatattgaggatgaacatagattgcacgagacctctaaggaacctgatgtttctcttggatcaacttggttgtcagatttcccacaagcatgggcagagaccggaggtatgggtcttgctgttaggcaggcaccacttattattcctttgaaggcaacctctactcctgtgtcaattaagcaatatccaatgtctcaggaagctaggcttggaattaagcctcacattcaaagacttttggatcagggtattttggtgccatgtcaatcaccttggaacacaccacttttgcctgttaagaagcctggaactaatgattacagaccagtgcaagatttgagggaggttaacaagagagtggaagatattcacccaactgttccaaacccttataatcttttgtctggattgccaccttcacatcaatggtacactgtgcttgatttgaaggatgcatttttctgccttaggttgcatccaacatctcagcctctttttgctttcgagtggagagatcctgaaatgggaatttctggtcaacttacatggaccaggttgcctcagggtttcaagaactcaccaaccttgtttaatgaggcacttcacagggatttggctgattttaggattcaacatcctgatcttatccttttgcagtatatggatgatcttttgcttgctgcaacttctgaattggattgtcaacagggaactagggcattgcttcaaacacttggaaatttgggttacagagcttcagcaaagaaggctcagatttgccaaaagcaggttaagtatcttggatacttgcttaaggaaggacaaaggtggttgaccgaggctagaaaggaaactgtgatgggtcaaccaacacctaagacccctaggcagcttagagagttcttgggaaaggcaggtttttgtaggcttttcattccaggatttgctgaaatggctgcaccactttatcctttgaccaagcctggaactttgtttaactggggtccagatcaacagaaggcataccaagaaattaagcaggctttgcttactgctccagcacttggtttgcctgatcttacaaagccatttgagttgttcgttgatgaaaagcaaggatatgcaaagggtgtgcttacccagaagttgggaccttggagaaggcctgttgcttacctttctaagaaacttgatccagtggctgcaggttggccaccttgtcttagaatggttgctgcaattgcagtgcttacaaaggatgctggaaagttgactatgggacaacctcttgttattttggcaccacacgctgttgaggcacttgtgaagcagccacctgataggtggttgtcaaacgcaagaatgacccattatcaagctcttcttttggatactgatagggtgcagttcggtcctgttgtggctttgaatccagcaacacttttgccacttcctgaggaaggattgcaacacaactgccttgatattttggctgaggcacatggtacaagacctgatcttaccgatcagccattgcctgatgctgatcacacttggtacacagatggatcttcacttttgcaagaaggacagaggaaggctggtgctgcagttactacagagactgaagtgatttgggctaaggcacttccagctggaacatctgctcaaagagcagagcttattgctttgacccaggcacttaagatggctgaaggaaagaagttgaacgtttacactgattctaggtatgctttcgcaacagctcatattcacggagaaatctatagaaggagaggatggttgacatcagagggaaaggaaattaagaacaaggatgaaattcttgcacttttgaaggctctttttcttcctaagagattgtctattattcattgcccaggacaccaaaagggtcattcagcagaagctaggggaaatagaatggctgatcaggctgcaagaaaggctgcaattactgagacacctgatacctctactcttttgatcgaaaactcttcaccaaattcaaggcttattaac

SEQ ID NO: 362 - DNA, 2049 bp, Synthetic construct
  source 1..2049: mol_type = other DNA
acacttaatattgaggatgaacatagattgcacgagacctctaaggaacctgatgtttctcttggatcaacttggttgtcagatttcccacaagcatgggcagagaccggaggtatgggtcttgctgttaggcaggcaccacttattattcctttgaaggcaacctctactcctgtgtcaattaagcaatatccaatgtctcaggaagctaggcttggaattaagcctcacattcaaagacttttggatcagggtattttggtgccatgtcaatcaccttggaacacaccacttttgcctgttaagaagcctggaactaatgattacagaccagtgcaagatttgagggaggttaacaagagagtggaagatattcacccaactgttccaaacccttataatcttttgtctggattgccaccttcacatcaatggtacactgtgcttgatttgaaggatgcatttttctgccttaggttgcatccaacatctcagcctctttttgctttcgagtggagagatcctgaaatgggaatttctggtcaacttacatggaccaggttgcctcagggtttcaagaactcaccaaccttgtttaatgaggcacttcacagggatttggctgattttaggattcaacatcctgatcttatccttttgcagtatttggatgatcttttgcttgctgcaacttctgaattggattgtcaacagggaactagggcattgcttcaaacacttggaaatttgggttacagagcttcagcaaagaaggctcagatttgccaaaagcaggttaagtatcttggatacttgcttaaggaaggacaaaggtggttgaccgaggctagaaaggaaactgtgatgggtcaaccaacacctaagacccctaggcagcttagagagttcttgggaaaggcaggtttttgtaggcttttcattccaggatttgctgaaatggctgcaccactttatcctttgaccaagcctggaactttgtttaactggggtccagatcaacagaaggcataccaagaaattaagcaggctttgcttactgctccagcacttggtttgcctgatcttacaaagccatttgagttgttcgttgatgaaaagcaaggatatgcaaagggtgtgcttacccagaagttgggaccttggagaaggcctgttgcttacctttctaagaaacttgatccagtggctgcaggttggccaccttgtcttagaatggttgctgcaattgcagtgcttacaaaggatgctggaaagttgactatgggacaacctcttgttattttggcaccacacgctgttgaggcacttgtgaagcagccacctgataggtggttgtcaaacgcaagaatgacccattatcaagctcttcttttggatactgatagggtgcagttcggtcctgttgtggctttgaatccagcaacacttttgccacttcctgaggaaggattgcaacacaactgccttgatattttggctgaggcacatggtacaagacctgatcttaccgatcagccattgcctgatgctgatcacacttggtacacagatggatcttcacttttgcaagaaggacagaggaaggctggtgctgcagttactacagagactgaagtgatttgggctaaggcacttccagctggaacatctgctcaaagagcagagcttattgctttgacccaggcacttaagatggctgaaggaaagaagttgaacgtttacactgattctaggtatgctttcgcaacagctcatattcacggagaaatctatagaaggagaggatggttgacatcagagggaaaggaaattaagaacaaggatgaaattcttgcacttttgaaggctctttttcttcctaagagattgtctattattcattgcccaggacaccaaaagggtcattcagcagaagctaggggaaatagaatggctgatcaggctgcaagaaaggctgcaattactgagacacctgatacctctactcttttgatcgaaaactcttcaccaaattcaaggcttattaac

SEQ ID NO: 363 - DNA, 2049 bp, Synthetic construct
  source 1..2049: mol_type = other DNA
acacttaatattgaggatgaacatagattgcacgagacctctaaggaacctgatgtttctcttggatcaacttggttgtcagatttcccacaagcatgggcagagaccggaggtatgggtcttgctgttaggcaggcaccacttattattcctttgaaggcaacctctactcctgtgtcaattaagcaatatccaatgtctcaggaagctaggcttggaattaagcctcacattcaaagacttttggatcagggtattttggtgccatgtcaatcaccttggaacacaccacttttgcctgttaagaagcctggaactaatgattacagaccagtgcaagatttgagggaggttaacaagagagtggaagatattcacccaactgttccaaacccttataatcttttgtctggattgccaccttcacatcaatggtacactgtgcttgatttgaaggatgcatttttctgccttaggttgcatccaacatctcagcctctttttgctttcgagtggagagatcctgaaatgggaatttctggtcaacttacatggaccaggttgcctcagggtttcaagaactcaccaaccttgtttaatgaggcacttcacagggatttggctgattttaggattcaacatcctgatcttatccttttgcagtattttgatgatcttttgcttgctgcaacttctgaattggattgtcaacagggaactagggcattgcttcaaacacttggaaatttgggttacagagcttcagcaaagaaggctcagatttgccaaaagcaggttaagtatcttggatacttgcttaaggaaggacaaaggtggttgaccgaggctagaaaggaaactgtgatgggtcaaccaacacctaagacccctaggcagcttagagagttcttgggaaaggcaggtttttgtaggcttttcattccaggatttgctgaaatggctgcaccactttatcctttgaccaagcctggaactttgtttaactggggtccagatcaacagaaggcataccaagaaattaagcaggctttgcttactgctccagcacttggtttgcctgatcttacaaagccatttgagttgttcgttgatgaaaagcaaggatatgcaaagggtgtgcttacccagaagttgggaccttggagaaggcctgttgcttacctttctaagaaacttgatccagtggctgcaggttggccaccttgtcttagaatggttgctgcaattgcagtgcttacaaaggatgctggaaagttgactatgggacaacctcttgttattttggcaccacacgctgttgaggcacttgtgaagcagccacctgataggtggttgtcaaacgcaagaatgacccattatcaagctcttcttttggatactgatagggtgcagttcggtcctgttgtggctttgaatccagcaacacttttgccacttcctgaggaaggattgcaacacaactgccttgatattttggctgaggcacatggtacaagacctgatcttaccgatcagccattgcctgatgctgatcacacttggtacacagatggatcttcacttttgcaagaaggacagaggaaggctggtgctgcagttactacagagactgaagtgatttgggctaaggcacttccagctggaacatctgctcaaagagcagagcttattgctttgacccaggcacttaagatggctgaaggaaagaagttgaacgtttacactgattctaggtatgctttcgcaacagctcatattcacggagaaatctatagaaggagaggatggttgacatcagagggaaaggaaattaagaacaaggatgaaattcttgcacttttgaaggctctttttcttcctaagagattgtctattattcattgcccaggacaccaaaagggtcattcagcagaagctaggggaaatagaatggctgatcaggctgcaagaaaggctgcaattactgagacacctgatacctctactcttttgatcgaaaactcttcaccaaattcaaggcttattaac

SEQ ID NO: 364 - DNA, 2049 bp, Synthetic construct
  source 1..2049: mol_type = other DNA
acacttaatattgaggatgaacatagattgcacgagacctctaaggaacctgatgtttctcttggatcaacttggttgtcagatttcccacaagcatgggcagagaccggaggtatgggtcttgctgttaggcaggcaccacttattattcctttgaaggcaacctctactcctgtgtcaattaagcaatatccaatgtctcaggaagctaggcttggaattaagcctcacattcaaagacttttggatcagggtattttggtgccatgtcaatcaccttggaacacaccacttttgcctgttaagaagcctggaactaatgattacagaccagtgcaagatttgagggaggttaacaagagagtggaagatattcacccaactgttccaaacccttataatcttttgtctggattgccaccttcacatcaatggtacactgtgcttgatttgaaggatgcatttttctgccttaggttgcatccaacatctcagcctctttttgctttcgagtggagagatcctgaaatgggaatttctggtcaacttacatggaccaggttgcctcagggtttcaagaactcaccaaccttgtttaatgaggcacttcacagggatttggctgattttaggattcaacatcctgatcttatccttttgcagtattacgatgatcttttgcttgctgcaacttctgaattggattgtcaacagggaactagggcattgcttcaaacacttggaaatttgggttacagagcttcagcaaagaaggctcagatttgccaaaagcaggttaagtatcttggatacttgcttaaggaaggacaaaggtggttgaccgaggctagaaaggaaactgtgatgggtcaaccaacacctaagacccctaggcagcttagagagttcttgggaaaggcaggtttttgtaggcttttcattccaggatttgctgaaatggctgcaccactttatcctttgaccaagcctggaactttgtttaactggggtccagatcaacagaaggcataccaagaaattaagcaggctttgcttactgctccagcacttggtttgcctgatcttacaaagccatttgagttgttcgttgatgaaaagcaaggatatgcaaagggtgtgcttacccagaagttgggaccttggagaaggcctgttgcttacctttctaagaaacttgatccagtggctgcaggttggccaccttgtcttagaatggttgctgcaattgcagtgcttacaaaggatgctggaaagttgactatgggacaacctcttgttattttggcaccacacgctgttgaggcacttgtgaagcagccacctgataggtggttgtcaaacgcaagaatgacccattatcaagctcttcttttggatactgatagggtgcagttcggtcctgttgtggctttgaatccagcaacacttttgccacttcctgaggaaggattgcaacacaactgccttgatattttggctgaggcacatggtacaagacctgatcttaccgatcagccattgcctgatgctgatcacacttggtacacagatggatcttcacttttgcaagaaggacagaggaaggctggtgctgcagttactacagagactgaagtgatttgggctaaggcacttccagctggaacatctgctcaaagagcagagcttattgctttgacccaggcacttaagatggctgaaggaaagaagttgaacgtttacactgattctaggtatgctttcgcaacagctcatattcacggagaaatctatagaaggagaggatggttgacatcagagggaaaggaaattaagaacaaggatgaaattcttgcacttttgaaggctctttttcttcctaagagattgtctattattcattgcccaggacaccaaaagggtcattcagcagaagctaggggaaatagaatggctgatcaggctgcaagaaaggctgcaattactgagacacctgatacctctactcttttgatcgaaaactcttcaccaaattcaaggcttattaac

SEQ ID NO: 365 - DNA, 2049 bp, Synthetic construct
  source 1..2049: mol_type = other DNA
acacttaatattgaggatgaacatagattgcacgagacctctaaggaacctgatgtttctcttggatcaacttggttgtcagatttcccacaagcatgggcagagaccggaggtatgggtcttgctgttaggcaggcaccacttattattcctttgaaggcaacctctactcctgtgtcaattaagcaatatccaatgtctcaggaagctaggcttggaattaagcctcacattcaaagacttttggatcagggtattttggtgccatgtcaatcaccttggaacacaccacttttgcctgttaagaagcctggaactaatgattacagaccagtgcaagatttgagggaggttaacaagagagtggaagatattcacccaactgttccaaacccttataatcttttgtctggattgccaccttcacatcaatggtacactgtgcttgatttgaaggatgcatttttctgccttaggttgcatccaacatctcagcctctttttgctttcgagtggagagatcctgaaatgggaatttctggtcaacttacatggaccaggttgcctcagggtttcaagaactcaccaaccttgtttaatgaggcacttcacagggatttggctgattttaggattcaacatcctgatcttatccttttgcagtatgctgatgatcttttgcttgctgcaacttctgaattggattgtcaacagggaactagggcattgcttcaaacacttggaaatttgggttacagagcttcagcaaagaaggctcagatttgccaaaagcaggttaagtatcttggatacttgcttaaggaaggacaaaggtggttgaccgaggctagaaaggaaactgtgatgggtcaaccaacacctaagacccctaggcagcttagagagttcttgggaaaggcaggtttttgtaggcttttcattccaggatttgctgaaatggctgcaccactttatcctttgaccaagcctggaactttgtttaactggggtccagatcaacagaaggcataccaagaaattaagcaggctttgcttactgctccagcacttggtttgcctgatcttacaaagccatttgagttgttcgttgatgaaaagcaaggatatgcaaagggtgtgcttacccagaagttgggaccttggagaaggcctgttgcttacctttctaagaaacttgatccagtggctgcaggttggccaccttgtcttagaatggttgctgcaattgcagtgcttacaaaggatgctggaaagttgactatgggacaacctcttgttattttggcaccacacgctgttgaggcacttgtgaagcagccacctgataggtggttgtcaaacgcaagaatgacccattatcaagctcttcttttggatactgatagggtgcagttcggtcctgttgtggctttgaatccagcaacacttttgccacttcctgaggaaggattgcaacacaactgccttgatattttggctgaggcacatggtacaagacctgatcttaccgatcagccattgcctgatgctgatcacacttggtacacagatggatcttcacttttgcaagaaggacagaggaaggctggtgctgcagttactacagagactgaagtgatttgggctaaggcacttccagctggaacatctgctcaaagagcagagcttattgctttgacccaggcacttaagatggctgaaggaaagaagttgaacgtttacactgattctaggtatgctttcgcaacagctcatattcacggagaaatctatagaaggagaggatggttgacatcagagggaaaggaaattaagaacaaggatgaaattcttgcacttttgaaggctctttttcttcctaagagattgtctattattcattgcccaggacaccaaaagggtcattcagcagaagctaggggaaatagaatggctgatcaggctgcaagaaaggctgcaattactgagacacctgatacctctactcttttgatcgaaaactcttcaccaaattcaaggcttattaac

SEQ ID NO: 366 - DNA, 2049 bp, Synthetic construct
  source 1..2049: mol_type = other DNA
acacttaatattgaggatgaacatagattgcacgagacctctaaggaacctgatgtttctcttggatcaacttggttgtcagatttcccacaagcatgggcagagaccggaggtatgggtcttgctgttaggcaggcaccacttattattcctttgaaggcaacctctactcctgtgtcaattaagcaatatccaatgtctcaggaagctaggcttggaattaagcctcacattcaaagacttttggatcagggtattttggtgccatgtcaatcaccttggaacacaccacttttgcctgttaagaagcctggaactaatgattacagaccagtgcaagatttgagggaggttaacaagagagtggaagatattcacccaactgttccaaacccttataatcttttgtctggattgccaccttcacatcaatggtacactgtgcttgatttgaaggatgcatttttctgccttaggttgcatccaacatctcagcctctttttgctttcgagtggagagatcctgaaatgggaatttctggtcaacttacatggaccaggttgcctcagggtttcaagaactcaccaaccttgtttaatgaggcacttcacagggatttggctgattttaggattcaacatcctgatcttatccttttgcagtatgttgatgatcttttgcttgctgcaacttctgaattggattgtcaacagggaactagggcattgcttcaaacacttggaaatttgggttacagagcttcagcaaagaaggctcagatttgccaaaagcaggttaagtatcttggatacttgcttaaggaaggacaaaggtggttgaccgaggctagaaaggaacatgtgatgggtcaaccaacacctaagacccctaggcagcttagagagttcttgggaaaggcaggtttttgtaggcttttcattccaggatttgctgaaatggctgcaccactttatcctttgaccaagcctggaactttgtttaactggggtccagatcaacagaaggcataccaagaaattaagcaggctttgcttactgctccagcacttggtttgcctgatcttacaaagccatttgagttgttcgttgatgaaaagcaaggatatgcaaagggtgtgcttacccagaagttgggaccttggagaaggcctgttgcttacctttctaagaaacttgatccagtggctgcaggttggccaccttgtcttagaatggttgctgcaattgcagtgcttacaaaggatgctggaaagttgactatgggacaacctcttgttattttggcaccacacgctgttgaggcacttgtgaagcagccacctgataggtggttgtcaaacgcaagaatgacccattatcaagctcttcttttggatactgatagggtgcagttcggtcctgttgtggctttgaatccagcaacacttttgccacttcctgaggaaggattgcaacacaactgccttgatattttggctgaggcacatggtacaagacctgatcttaccgatcagccattgcctgatgctgatcacacttggtacacagatggatcttcacttttgcaagaaggacagaggaaggctggtgctgcagttactacagagactgaagtgatttgggctaaggcacttccagctggaacatctgctcaaagagcagagcttattgctttgacccaggcacttaagatggctgaaggaaagaagttgaacgtttacactgattctaggtatgctttcgcaacagctcatattcacggagaaatctatagaaggagaggatggttgacatcagagggaaaggaaattaagaacaaggatgaaattcttgcacttttgaaggctctttttcttcctaagagattgtctattattcattgcccaggacaccaaaagggtcattcagcagaagctaggggaaatagaatggctgatcaggctgcaagaaaggctgcaattactgagacacctgatacctctactcttttgatcgaaaactcttcaccaaattcaaggcttattaac

SEQ ID NO: 367 - DNA, 2049 bp, Synthetic construct
  source 1..2049: mol_type = other DNA
acacttaatattgaggatgaacatagattgcacgagacctctaaggaacctgatgtttctcttggatcaacttggttgtcagatttcccacaagcatgggcagagaccggaggtatgggtcttgctgttaggcaggcaccacttattattcctttgaaggcaacctctactcctgtgtcaattaagcaatatccaatgtctcaggaagctaggcttggaattaagcctcacattcaaagacttttggatcagggtattttggtgccatgtcaatcaccttggaacacaccacttttgcctgttaagaagcctggaactaatgattacagaccagtgcaagatttgagggaggttaacaagagagtggaagatattcacccaactgttccaaacccttataatcttttgtctggattgccaccttcacatcaatggtacactgtgcttgatttgaaggatgcatttttctgccttaggttgcatccaacatctcagcctctttttgctttcgagtggagagatcctgaaatgggaatttctggtcaacttacatggaccaggttgcctcagggtttcaagaactcaccaaccttgtttaatgaggcacttcacagggatttggctgattttaggattcaacatcctgatcttatccttttgcagtatgttgatgatcttttgcttgctgcaacttctgaattggattgtcaacagggaactagggcattgcttcaaacacttggaaatttgggttacagagcttcagcaaagaaggctcagatttgccaaaagcaggttaagtatcttggatacttgcttaaggaaggacaaaggtggttgaccgaggctagaaaggaaaacgtgatgggtcaaccaacacctaagacccctaggcagcttagagagttcttgggaaaggcaggtttttgtaggcttttcattccaggatttgctgaaatggctgcaccactttatcctttgaccaagcctggaactttgtttaactggggtccagatcaacagaaggcataccaagaaattaagcaggctttgcttactgctccagcacttggtttgcctgatcttacaaagccatttgagttgttcgttgatgaaaagcaaggatatgcaaagggtgtgcttacccagaagttgggaccttggagaaggcctgttgcttacctttctaagaaacttgatccagtggctgcaggttggccaccttgtcttagaatggttgctgcaattgcagtgcttacaaaggatgctggaaagttgactatgggacaacctcttgttattttggcaccacacgctgttgaggcacttgtgaagcagccacctgataggtggttgtcaaacgcaagaatgacccattatcaagctcttcttttggatactgatagggtgcagttcggtcctgttgtggctttgaatccagcaacacttttgccacttcctgaggaaggattgcaacacaactgccttgatattttggctgaggcacatggtacaagacctgatcttaccgatcagccattgcctgatgctgatcacacttggtacacagatggatcttcacttttgcaagaaggacagaggaaggctggtgctgcagttactacagagactgaagtgatttgggctaaggcacttccagctggaacatctgctcaaagagcagagcttattgctttgacccaggcacttaagatggctgaaggaaagaagttgaacgtttacactgattctaggtatgctttcgcaacagctcatattcacggagaaatctatagaaggagaggatggttgacatcagagggaaaggaaattaagaacaaggatgaaattcttgcacttttgaaggctctttttcttcctaagagattgtctattattcattgcccaggacaccaaaagggtcattcagcagaagctaggggaaatagaatggctgatcaggctgcaagaaaggctgcaattactgagacacctgatacctctactcttttgatcgaaaactcttcaccaaattcaaggcttattaac

SEQ ID NO: 368 - DNA, 2049 bp, Synthetic construct
  source 1..2049: mol_type = other DNA
acacttaatattgaggatgaacatagattgcacgagacctctaaggaacctgatgtttctcttggatcaacttggttgtcagatttcccacaagcatgggcagagaccggaggtatgggtcttgctgttaggcaggcaccacttattattcctttgaaggcaacctctactcctgtgtcaattaagcaatatccaatgtctcaggaagctaggcttggaattaagcctcacattcaaagacttttggatcagggtattttggtgccatgtcaatcaccttggaacacaccacttttgcctgttaagaagcctggaactaatgattacagaccagtgcaagatttgagggaggttaacaagagagtggaagatattcacccaactgttccaaacccttataatcttttgtctggattgccaccttcacatcaatggtacactgtgcttgatttgaaggatgcatttttctgccttaggttgcatccaacatctcagcctctttttgctttcgagtggagagatcctgaaatgggaatttctggtcaacttacatggaccaggttgcctcagggtttcaagaactcaccaaccttgtttaatgaggcacttcacagggatttggctgattttaggattcaacatcctgatcttatccttttgcagtatgttgatgatcttttgcttgctgcaacttctgaattggattgtcaacagggaactagggcattgcttcaaacacttggaaatttgggttacagagcttcagcaaagaaggctcagatttgccaaaagcaggttaagtatcttggatacttgcttaaggaaggacaaaggtggttgaccgaggctagaaaggaaattgtgatgggtcaaccaacacctaagacccctaggcagcttagagagttcttgggaaaggcaggtttttgtaggcttttcattccaggatttgctgaaatggctgcaccactttatcctttgaccaagcctggaactttgtttaactggggtccagatcaacagaaggcataccaagaaattaagcaggctttgcttactgctccagcacttggtttgcctgatcttacaaagccatttgagttgttcgttgatgaaaagcaaggatatgcaaagggtgtgcttacccagaagttgggaccttggagaaggcctgttgcttacctttctaagaaacttgatccagtggctgcaggttggccaccttgtcttagaatggttgctgcaattgcagtgcttacaaaggatgctggaaagttgactatgggacaacctcttgttattttggcaccacacgctgttgaggcacttgtgaagcagccacctgataggtggttgtcaaacgcaagaatgacccattatcaagctcttcttttggatactgatagggtgcagttcggtcctgttgtggctttgaatccagcaacacttttgccacttcctgaggaaggattgcaacacaactgccttgatattttggctgaggcacatggtacaagacctgatcttaccgatcagccattgcctgatgctgatcacacttggtacacagatggatcttcacttttgcaagaaggacagaggaaggctggtgctgcagttactacagagactgaagtgatttgggctaaggcacttccagctggaacatctgctcaaagagcagagcttattgctttgacccaggcacttaagatggctgaaggaaagaagttgaacgtttacactgattctaggtatgctttcgcaacagctcatattcacggagaaatctatagaaggagaggatggttgacatcagagggaaaggaaattaagaacaaggatgaaattcttgcacttttgaaggctctttttcttcctaagagattgtctattattcattgcccaggacaccaaaagggtcattcagcagaagctaggggaaatagaatggctgatcaggctgcaagaaaggctgcaattactgagacacctgatacctctactcttttgatcgaaaactcttcaccaaattcaaggcttattaac

SEQ ID NO: 369 - DNA, 2049 bp, Synthetic construct
  source 1..2049: mol_type = other DNA
acacttaatattgaggatgaacatagattgcacgagacctctaaggaacctgatgtttctcttggatcaacttggttgtcagatttcccacaagcatgggcagagaccggaggtatgggtcttgctgttaggcaggcaccacttattattcctttgaaggcaacctctactcctgtgtcaattaagcaatatccaatgtctcaggaagctaggcttggaattaagcctcacattcaaagacttttggatcagggtattttggtgccatgtcaatcaccttggaacacaccacttttgcctgttaagaagcctggaactaatgattacagaccagtgcaagatttgagggaggttaacaagagagtggaagatattcacccaactgttccaaacccttataatcttttgtctggattgccaccttcacatcaatggtacactgtgcttgatttgaaggatgcatttttctgccttaggttgcatccaacatctcagcctctttttgctttcgagtggagagatcctgaaatgggaatttctggtcaacttacatggaccaggttgcctcagggtttcaagaactcaccaaccttgtttaatgaggcacttcacagggatttggctgattttaggattcaacatcctgatcttatccttttgcagtatgttgatgatcttttgcttgctgcaacttctgaattggattgtcaacagggaactagggcattgcttcaaacacttggaaatttgggttacagagcttcagcaaagaaggctcagatttgccaaaagcaggttaagtatcttggatacttgcttaaggaaggacaaaggtggttgaccgaggctagaaaggaagctgtgatgggtcaaccaacacctaagacccctaggcagcttagagagttcttgggaaaggcaggtttttgtaggcttttcattccaggatttgctgaaatggctgcaccactttatcctttgaccaagcctggaactttgtttaactggggtccagatcaacagaaggcataccaagaaattaagcaggctttgcttactgctccagcacttggtttgcctgatcttacaaagccatttgagttgttcgttgatgaaaagcaaggatatgcaaagggtgtgcttacccagaagttgggaccttggagaaggcctgttgcttacctttctaagaaacttgatccagtggctgcaggttggccaccttgtcttagaatggttgctgcaattgcagtgcttacaaaggatgctggaaagttgactatgggacaacctcttgttattttggcaccacacgctgttgaggcacttgtgaagcagccacctgataggtggttgtcaaacgcaagaatgacccattatcaagctcttcttttggatactgatagggtgcagttcggtcctgttgtggctttgaatccagcaacacttttgccacttcctgaggaaggattgcaacacaactgccttgatattttggctgaggcacatggtacaagacctgatcttaccgatcagccattgcctgatgctgatcacacttggtacacagatggatcttcacttttgcaagaaggacagaggaaggctggtgctgcagttactacagagactgaagtgatttgggctaaggcacttccagctggaacatctgctcaaagagcagagcttattgctttgacccaggcacttaagatggctgaaggaaagaagttgaacgtttacactgattctaggtatgctttcgcaacagctcatattcacggagaaatctatagaaggagaggatggttgacatcagagggaaaggaaattaagaacaaggatgaaattcttgcacttttgaaggctctttttcttcctaagagattgtctattattcattgcccaggacaccaaaagggtcattcagcagaagctaggggaaatagaatggctgatcaggctgcaagaaaggctgcaattactgagacacctgatacctctactcttttgatcgaaaactcttcaccaaattcaaggcttattaac

SEQ ID NO: 370 - DNA, 2049 bp, Synthetic construct
  source 1..2049: mol_type = other DNA
acacttaatattgaggatgaacatagattgcacgagacctctaaggaacctgatgtttctcttggatcaacttggttgtcagatttcccacaagcatgggcagagaccggaggtatgggtcttgctgttaggcaggcaccacttattattcctttgaaggcaacctctactcctgtgtcaattaagcaatatccaatgtctcaggaagctaggcttggaattaagcctcacattcaaagacttttggatcagggtattttggtgccatgtcaatcaccttggaacacaccacttttgcctgttaagaagcctggaactaatgattacagaccagtgcaagatttgagggaggttaacaagagagtggaagatattcacccaactgttccaaacccttataatcttttgtctggattgccaccttcacatcaatggtacactgtgcttgatttgaaggatgcatttttctgccttaggttgcatccaacatctcagcctctttttgctttcgagtggagagatcctgaaatgggaatttctggtcaacttacatggaccaggttgcctcagggtttcaagaactcaccaaccttgtttaatgaggcacttcacagggatttggctgattttaggattcaacatcctgatcttatccttttgcagtatgttgatgatcttttgcttgctgcaacttctgaattggattgtcaacagggaactagggcattgcttcaaacacttggaaatttgggttacagagcttcagcaaagaaggctcagatttgccaaaagcaggttaagtatcttggatacttgcttaaggaaggacaaaggtggttgaccgaggctagaaaggaaggtgtgatgggtcaaccaacacctaagacccctaggcagcttagagagttcttgggaaaggcaggtttttgtaggcttttcattccaggatttgctgaaatggctgcaccactttatcctttgaccaagcctggaactttgtttaactggggtccagatcaacagaaggcataccaagaaattaagcaggctttgcttactgctccagcacttggtttgcctgatcttacaaagccatttgagttgttcgttgatgaaaagcaaggatatgcaaagggtgtgcttacccagaagttgggaccttggagaaggcctgttgcttacctttctaagaaacttgatccagtggctgcaggttggccaccttgtcttagaatggttgctgcaattgcagtgcttacaaaggatgctggaaagttgactatgggacaacctcttgttattttggcaccacacgctgttgaggcacttgtgaagcagccacctgataggtggttgtcaaacgcaagaatgacccattatcaagctcttcttttggatactgatagggtgcagttcggtcctgttgtggctttgaatccagcaacacttttgccacttcctgaggaaggattgcaacacaactgccttgatattttggctgaggcacatggtacaagacctgatcttaccgatcagccattgcctgatgctgatcacacttggtacacagatggatcttcacttttgcaagaaggacagaggaaggctggtgctgcagttactacagagactgaagtgatttgggctaaggcacttccagctggaacatctgctcaaagagcagagcttattgctttgacccaggcacttaagatggctgaaggaaagaagttgaacgtttacactgattctaggtatgctttcgcaacagctcatattcacggagaaatctatagaaggagaggatggttgacatcagagggaaaggaaattaagaacaaggatgaaattcttgcacttttgaaggctctttttcttcctaagagattgtctattattcattgcccaggacaccaaaagggtcattcagcagaagctaggggaaatagaatggctgatcaggctgcaagaaaggctgcaattactgagacacctgatacctctactcttttgatcgaaaactcttcaccaaattcaaggcttattaac

SEQ ID NO: 371 - DNA, 2049 bp, Synthetic construct
  source 1..2049: mol_type = other DNA
acacttaatattgaggatgaacatagattgcacgagacctctaaggaacctgatgtttctcttggatcaacttggttgtcagatttcccacaagcatgggcagagaccggaggtatgggtcttgctgttaggcaggcaccacttattattcctttgaaggcaacctctactcctgtgtcaattaagcaatatccaatgtctcaggaagctaggcttggaattaagcctcacattcaaagacttttggatcagggtattttggtgccatgtcaatcaccttggaacacaccacttttgcctgttaagaagcctggaactaatgattacagaccagtgcaagatttgagggaggttaacaagagagtggaagatattcacccaactgttccaaacccttataatcttttgtctggattgccaccttcacatcaatggtacactgtgcttgatttgaaggatgcatttttctgccttaggttgcatccaacatctcagcctctttttgctttcgagtggagagatcctgaaatgggaatttctggtcaacttacatggaccaggttgcctcagggtttcaagaactcaccaaccttgtttaatgaggcacttcacagggatttggctgattttaggattcaacatcctgatcttatccttttgcagtatgttgatgatcttttgcttgctgcaacttctgaattggattgtcaacagggaactagggcattgcttcaaacacttggaaatttgggttacagagcttcagcaaagaaggctcagatttgccaaaagcaggttaagtatcttggatacttgcttaaggaaggacaaaggtggttgaccgaggctagaaaggaagatgtgatgggtcaaccaacacctaagacccctaggcagcttagagagttcttgggaaaggcaggtttttgtaggcttttcattccaggatttgctgaaatggctgcaccactttatcctttgaccaagcctggaactttgtttaactggggtccagatcaacagaaggcataccaagaaattaagcaggctttgcttactgctccagcacttggtttgcctgatcttacaaagccatttgagttgttcgttgatgaaaagcaaggatatgcaaagggtgtgcttacccagaagttgggaccttggagaaggcctgttgcttacctttctaagaaacttgatccagtggctgcaggttggccaccttgtcttagaatggttgctgcaattgcagtgcttacaaaggatgctggaaagttgactatgggacaacctcttgttattttggcaccacacgctgttgaggcacttgtgaagcagccacctgataggtggttgtcaaacgcaagaatgacccattatcaagctcttcttttggatactgatagggtgcagttcggtcctgttgtggctttgaatccagcaacacttttgccacttcctgaggaaggattgcaacacaactgccttgatattttggctgaggcacatggtacaagacctgatcttaccgatcagccattgcctgatgctgatcacacttggtacacagatggatcttcacttttgcaagaaggacagaggaaggctggtgctgcagttactacagagactgaagtgatttgggctaaggcacttccagctggaacatctgctcaaagagcagagcttattgctttgacccaggcacttaagatggctgaaggaaagaagttgaacgtttacactgattctaggtatgctttcgcaacagctcatattcacggagaaatctatagaaggagaggatggttgacatcagagggaaaggaaattaagaacaaggatgaaattcttgcacttttgaaggctctttttcttcctaagagattgtctattattcattgcccaggacaccaaaagggtcattcagcagaagctaggggaaatagaatggctgatcaggctgcaagaaaggctgcaattactgagacacctgatacctctactcttttgatcgaaaactcttcaccaaattcaaggcttattaac

SEQ ID NO: 372 - DNA, 2049 bp, Synthetic construct
  source 1..2049: mol_type = other DNA
acacttaatattgaggatgaacatagattgcacgagacctctaaggaacctgatgtttctcttggatcaacttggttgtcagatttcccacaagcatgggcagagaccggaggtatgggtcttgctgttaggcaggcaccacttattattcctttgaaggcaacctctactcctgtgtcaattaagcaatatccaatgtctcaggaagctaggcttggaattaagcctcacattcaaagacttttggatcagggtattttggtgccatgtcaatcaccttggaacacaccacttttgcctgttaagaagcctggaactaatgattacagaccagtgcaagatttgagggaggttaacaagagagtggaagatattcacccaactgttccaaacccttataatcttttgtctggattgccaccttcacatcaatggtacactgtgcttgatttgaaggatgcatttttctgccttaggttgcatccaacatctcagcctctttttgctttcgagtggagagatcctgaaatgggaatttctggtcaacttacatggaccaggttgcctcagggtttcaagaactcaccaaccttgtttaatgaggcacttcacagggatttggctgattttaggattcaacatcctgatcttatccttttgcagtatgttgatgatcttttgcttgctgcaacttctgaattggattgtcaacagggaactagggcattgcttcaaacacttggaaatttgggttacagagcttcagcaaagaaggctcagatttgccaaaagcaggttaagtatcttggatacttgcttaaggaaggacaaaggtggttgaccgaggctagaaaggaaactgtgatgggtcaaccaacacctaagacccctaggcagcttagagagttcttgggaaaggcaggtgcttgtaggcttttcattccaggatttgctgaaatggctgcaccactttatcctttgaccaagcctggaactttgtttaactggggtccagatcaacagaaggcataccaagaaattaagcaggctttgcttactgctccagcacttggtttgcctgatcttacaaagccatttgagttgttcgttgatgaaaagcaaggatatgcaaagggtgtgcttacccagaagttgggaccttggagaaggcctgttgcttacctttctaagaaacttgatccagtggctgcaggttggccaccttgtcttagaatggttgctgcaattgcagtgcttacaaaggatgctggaaagttgactatgggacaacctcttgttattttggcaccacacgctgttgaggcacttgtgaagcagccacctgataggtggttgtcaaacgcaagaatgacccattatcaagctcttcttttggatactgatagggtgcagttcggtcctgttgtggctttgaatccagcaacacttttgccacttcctgaggaaggattgcaacacaactgccttgatattttggctgaggcacatggtacaagacctgatcttaccgatcagccattgcctgatgctgatcacacttggtacacagatggatcttcacttttgcaagaaggacagaggaaggctggtgctgcagttactacagagactgaagtgatttgggctaaggcacttccagctggaacatctgctcaaagagcagagcttattgctttgacccaggcacttaagatggctgaaggaaagaagttgaacgtttacactgattctaggtatgctttcgcaacagctcatattcacggagaaatctatagaaggagaggatggttgacatcagagggaaaggaaattaagaacaaggatgaaattcttgcacttttgaaggctctttttcttcctaagagattgtctattattcattgcccaggacaccaaaagggtcattcagcagaagctaggggaaatagaatggctgatcaggctgcaagaaaggctgcaattactgagacacctgatacctctactcttttgatcgaaaactcttcaccaaattcaaggcttattaac

SEQ ID NO: 373 - DNA, 2049 bp, Synthetic construct
  source 1..2049: mol_type = other DNA
acacttaatattgaggatgaacatagattgcacgagacctctaaggaacctgatgtttctcttggatcaacttggttgtcagatttcccacaagcatgggcagagaccggaggtatgggtcttgctgttaggcaggcaccacttattattcctttgaaggcaacctctactcctgtgtcaattaagcaatatccaatgtctcaggaagctaggcttggaattaagcctcacattcaaagacttttggatcagggtattttggtgccatgtcaatcaccttggaacacaccacttttgcctgttaagaagcctggaactaatgattacagaccagtgcaagatttgagggaggttaacaagagagtggaagatattcacccaactgttccaaacccttataatcttttgtctggattgccaccttcacatcaatggtacactgtgcttgatttgaaggatgcatttttctgccttaggttgcatccaacatctcagcctctttttgctttcgagtggagagatcctgaaatgggaatttctggtcaacttacatggaccaggttgcctcagggtttcaagaactcaccaaccttgtttaatgaggcacttcacagggatttggctgattttaggattcaacatcctgatcttatccttttgcagtatgttgatgatcttttgcttgctgcaacttctgaattggattgtcaacagggaactagggcattgcttcaaacacttggaaatttgggttacagagcttcagcaaagaaggctcagatttgccaaaagcaggttaagtatcttggatacttgcttaaggaaggacaaaggtggttgaccgaggctagaaaggaaactgtgatgggtcaaccaacacctaagacccctaggcagcttagagagttcttgggaaaggcaggtaactgtaggcttttcattccaggatttgctgaaatggctgcaccactttatcctttgaccaagcctggaactttgtttaactggggtccagatcaacagaaggcataccaagaaattaagcaggctttgcttactgctccagcacttggtttgcctgatcttacaaagccatttgagttgttcgttgatgaaaagcaaggatatgcaaagggtgtgcttacccagaagttgggaccttggagaaggcctgttgcttacctttctaagaaacttgatccagtggctgcaggttggccaccttgtcttagaatggttgctgcaattgcagtgcttacaaaggatgctggaaagttgactatgggacaacctcttgttattttggcaccacacgctgttgaggcacttgtgaagcagccacctgataggtggttgtcaaacgcaagaatgacccattatcaagctcttcttttggatactgatagggtgcagttcggtcctgttgtggctttgaatccagcaacacttttgccacttcctgaggaaggattgcaacacaactgccttgatattttggctgaggcacatggtacaagacctgatcttaccgatcagccattgcctgatgctgatcacacttggtacacagatggatcttcacttttgcaagaaggacagaggaaggctggtgctgcagttactacagagactgaagtgatttgggctaaggcacttccagctggaacatctgctcaaagagcagagcttattgctttgacccaggcacttaagatggctgaaggaaagaagttgaacgtttacactgattctaggtatgctttcgcaacagctcatattcacggagaaatctatagaaggagaggatggttgacatcagagggaaaggaaattaagaacaaggatgaaattcttgcacttttgaaggctctttttcttcctaagagattgtctattattcattgcccaggacaccaaaagggtcattcagcagaagctaggggaaatagaatggctgatcaggctgcaagaaaggctgcaattactgagacacctgatacctctactcttttgatcgaaaactcttcaccaaattcaaggcttattaac

SEQ ID NO: 374 - DNA, 2049 bp, Synthetic construct
  source 1..2049: mol_type = other DNA
acacttaatattgaggatgaacatagattgcacgagacctctaaggaacctgatgtttctcttggatcaacttggttgtcagatttcccacaagcatgggcagagaccggaggtatgggtcttgctgttaggcaggcaccacttattattcctttgaaggcaacctctactcctgtgtcaattaagcaatatccaatgtctcaggaagctaggcttggaattaagcctcacattcaaagacttttggatcagggtattttggtgccatgtcaatcaccttggaacacaccacttttgcctgttaagaagcctggaactaatgattacagaccagtgcaagatttgagggaggttaacaagagagtggaagatattcacccaactgttccaaacccttataatcttttgtctggattgccaccttcacatcaatggtacactgtgcttgatttgaaggatgcatttttctgccttaggttgcatccaacatctcagcctctttttgctttcgagtggagagatcctgaaatgggaatttctggtcaacttacatggaccaggttgcctcagggtttcaagaactcaccaaccttgtttaatgaggcacttcacagggatttggctgattttaggattcaacatcctgatcttatccttttgcagtatgttgatgatcttttgcttgctgcaacttctgaattggattgtcaacagggaactagggcattgcttcaaacacttggaaatttgggttacagagcttcagcaaagaaggctcagatttgccaaaagcaggttaagtatcttggatacttgcttaaggaaggacaaaggtggttgaccgaggctagaaaggaaactgtgatgggtcaaccaacacctaagacccctaggcagcttagagagttcttgggaaaggcaggttcatgtaggcttttcattccaggatttgctgaaatggctgcaccactttatcctttgaccaagcctggaactttgtttaactggggtccagatcaacagaaggcataccaagaaattaagcaggctttgcttactgctccagcacttggtttgcctgatcttacaaagccatttgagttgttcgttgatgaaaagcaaggatatgcaaagggtgtgcttacccagaagttgggaccttggagaaggcctgttgcttacctttctaagaaacttgatccagtggctgcaggttggccaccttgtcttagaatggttgctgcaattgcagtgcttacaaaggatgctggaaagttgactatgggacaacctcttgttattttggcaccacacgctgttgaggcacttgtgaagcagccacctgataggtggttgtcaaacgcaagaatgacccattatcaagctcttcttttggatactgatagggtgcagttcggtcctgttgtggctttgaatccagcaacacttttgccacttcctgaggaaggattgcaacacaactgccttgatattttggctgaggcacatggtacaagacctgatcttaccgatcagccattgcctgatgctgatcacacttggtacacagatggatcttcacttttgcaagaaggacagaggaaggctggtgctgcagttactacagagactgaagtgatttgggctaaggcacttccagctggaacatctgctcaaagagcagagcttattgctttgacccaggcacttaagatggctgaaggaaagaagttgaacgtttacactgattctaggtatgctttcgcaacagctcatattcacggagaaatctatagaaggagaggatggttgacatcagagggaaaggaaattaagaacaaggatgaaattcttgcacttttgaaggctctttttcttcctaagagattgtctattattcattgcccaggacaccaaaagggtcattcagcagaagctaggggaaatagaatggctgatcaggctgcaagaaaggctgcaattactgagacacctgatacctctactcttttgatcgaaaactcttcaccaaattcaaggcttattaac

SEQ ID NO: 375 - DNA, 2049 bp, Synthetic construct
  source 1..2049: mol_type = other DNA
acacttaatattgaggatgaacatagattgcacgagacctctaaggaacctgatgtttctcttggatcaacttggttgtcagatttcccacaagcatgggcagagaccggaggtatgggtcttgctgttaggcaggcaccacttattattcctttgaaggcaacctctactcctgtgtcaattaagcaatatccaatgtctcaggaagctaggcttggaattaagcctcacattcaaagacttttggatcagggtattttggtgccatgtcaatcaccttggaacacaccacttttgcctgttaagaagcctggaactaatgattacagaccagtgcaagatttgagggaggttaacaagagagtggaagatattcacccaactgttccaaacccttataatcttttgtctggattgccaccttcacatcaatggtacactgtgcttgatttgaaggatgcatttttctgccttaggttgcatccaacatctcagcctctttttgctttcgagtggagagatcctgaaatgggaatttctggtcaacttacatggaccaggttgcctcagggtttcaagaactcaccaaccttgtttaatgaggcacttcacagggatttggctgattttaggattcaacatcctgatcttatccttttgcagtatgttgatgatcttttgcttgctgcaacttctgaattggattgtcaacagggaactagggcattgcttcaaacacttggaaatttgggttacagagcttcagcaaagaaggctcagatttgccaaaagcaggttaagtatcttggatacttgcttaaggaaggacaaaggtggttgaccgaggctagaaaggaaactgtgatgggtcaaccaacacctaagacccctaggcagcttagagagttcttgggaaaggcaggttgttgtaggcttttcattccaggatttgctgaaatggctgcaccactttatcctttgaccaagcctggaactttgtttaactggggtccagatcaacagaaggcataccaagaaattaagcaggctttgcttactgctccagcacttggtttgcctgatcttacaaagccatttgagttgttcgttgatgaaaagcaaggatatgcaaagggtgtgcttacccagaagttgggaccttggagaaggcctgttgcttacctttctaagaaacttgatccagtggctgcaggttggccaccttgtcttagaatggttgctgcaattgcagtgcttacaaaggatgctggaaagttgactatgggacaacctcttgttattttggcaccacacgctgttgaggcacttgtgaagcagccacctgataggtggttgtcaaacgcaagaatgacccattatcaagctcttcttttggatactgatagggtgcagttcggtcctgttgtggctttgaatccagcaacacttttgccacttcctgaggaaggattgcaacacaactgccttgatattttggctgaggcacatggtacaagacctgatcttaccgatcagccattgcctgatgctgatcacacttggtacacagatggatcttcacttttgcaagaaggacagaggaaggctggtgctgcagttactacagagactgaagtgatttgggctaaggcacttccagctggaacatctgctcaaagagcagagcttattgctttgacccaggcacttaagatggctgaaggaaagaagttgaacgtttacactgattctaggtatgctttcgcaacagctcatattcacggagaaatctatagaaggagaggatggttgacatcagagggaaaggaaattaagaacaaggatgaaattcttgcacttttgaaggctctttttcttcctaagagattgtctattattcattgcccaggacaccaaaagggtcattcagcagaagctaggggaaatagaatggctgatcaggctgcaagaaaggctgcaattactgagacacctgatacctctactcttttgatcgaaaactcttcaccaaattcaaggcttattaac

SEQ ID NO: 376 - DNA, 2049 bp, Synthetic construct
  source 1..2049: mol_type = other DNA
acacttaatattgaggatgaacatagattgcacgagacctctaaggaacctgatgtttctcttggatcaacttggttgtcagatttcccacaagcatgggcagagaccggaggtatgggtcttgctgttaggcaggcaccacttattattcctttgaaggcaacctctactcctgtgtcaattaagcaatatccaatgtctcaggaagctaggcttggaattaagcctcacattcaaagacttttggatcagggtattttggtgccatgtcaatcaccttggaacacaccacttttgcctgttaagaagcctggaactaatgattacagaccagtgcaagatttgagggaggttaacaagagagtggaagatattcacccaactgttccaaacccttataatcttttgtctggattgccaccttcacatcaatggtacactgtgcttgatttgaaggatgcatttttctgccttaggttgcatccaacatctcagcctctttttgctttcgagtggagagatcctgaaatgggaatttctggtcaacttacatggaccaggttgcctcagggtttcaagaactcaccaaccttgtttaatgaggcacttcacagggatttggctgattttaggattcaacatcctgatcttatccttttgcagtatgttgatgatcttttgcttgctgcaacttctgaattggattgtcaacagggaactagggcattgcttcaaacacttggaaatttgggttacagagcttcagcaaagaaggctcagatttgccaaaagcaggttaagtatcttggatacttgcttaaggaaggacaaaggtggttgaccgaggctagaaaggaaactgtgatgggtcaaccaacacctaagacccctaggcagcttagagagttcttgggaaaggcaggtggttgtaggcttttcattccaggatttgctgaaatggctgcaccactttatcctttgaccaagcctggaactttgtttaactggggtccagatcaacagaaggcataccaagaaattaagcaggctttgcttactgctccagcacttggtttgcctgatcttacaaagccatttgagttgttcgttgatgaaaagcaaggatatgcaaagggtgtgcttacccagaagttgggaccttggagaaggcctgttgcttacctttctaagaaacttgatccagtggctgcaggttggccaccttgtcttagaatggttgctgcaattgcagtgcttacaaaggatgctggaaagttgactatgggacaacctcttgttattttggcaccacacgctgttgaggcacttgtgaagcagccacctgataggtggttgtcaaacgcaagaatgacccattatcaagctcttcttttggatactgatagggtgcagttcggtcctgttgtggctttgaatccagcaacacttttgccacttcctgaggaaggattgcaacacaactgccttgatattttggctgaggcacatggtacaagacctgatcttaccgatcagccattgcctgatgctgatcacacttggtacacagatggatcttcacttttgcaagaaggacagaggaaggctggtgctgcagttactacagagactgaagtgatttgggctaaggcacttccagctggaacatctgctcaaagagcagagcttattgctttgacccaggcacttaagatggctgaaggaaagaagttgaacgtttacactgattctaggtatgctttcgcaacagctcatattcacggagaaatctatagaaggagaggatggttgacatcagagggaaaggaaattaagaacaaggatgaaattcttgcacttttgaaggctctttttcttcctaagagattgtctattattcattgcccaggacaccaaaagggtcattcagcagaagctaggggaaatagaatggctgatcaggctgcaagaaaggctgcaattactgagacacctgatacctctactcttttgatcgaaaactcttcaccaaattcaaggcttattaac

SEQ ID NO: 377 - DNA, 2049 bp, Synthetic construct
  source 1..2049: mol_type = other DNA
acacttaatattgaggatgaacatagattgcacgagacctctaaggaacctgatgtttctcttggatcaacttggttgtcagatttcccacaagcatgggcagagaccggaggtatgggtcttgctgttaggcaggcaccacttattattcctttgaaggcaacctctactcctgtgtcaattaagcaatatccaatgtctcaggaagctaggcttggaattaagcctcacattcaaagacttttggatcagggtattttggtgccatgtcaatcaccttggaacacaccacttttgcctgttaagaagcctggaactaatgattacagaccagtgcaagatttgagggaggttaacaagagagtggaagatattcacccaactgttccaaacccttataatcttttgtctggattgccaccttcacatcaatggtacactgtgcttgatttgaaggatgcatttttctgccttaggttgcatccaacatctcagcctctttttgctttcgagtggagagatcctgaaatgggaatttctggtcaacttacatggaccaggttgcctcagggtttcaagaactcaccaaccttgtttaatgaggcacttcacagggatttggctgattttaggattcaacatcctgatcttatccttttgcagtatgttgatgatcttttgcttgctgcaacttctgaattggattgtcaacagggaactagggcattgcttcaaacacttggaaatttgggttacagagcttcagcaaagaaggctcagatttgccaaaagcaggttaagtatcttggatacttgcttaaggaaggacaaaggtggttgaccgaggctagaaaggaaactgtgatgggtcaaccaacacctaagacccctaggcagcttagagagttcttgggaaaggcaggtttttgtaggcttttcattccaggatttgctgaaatggctgcaccactttatcctttgaccaagcctggaactttgtttaactggggtccagatcaacagaaggcataccaagaaattaagcaggctttgcttactgctccagcacttggtttgcctgatcttacaaagccatttgagttgttcgttgatgaaaagcaaggatatgcaaagggtgtgcttacccagaagttgggaccttggagaaggcctgttgcttacctttctaagaaacttgatccagtggctgcaggttggccaccttgtcttagaatggttgctgcaattgcagtgcttacaaaggatgctggaaagttgactatgggacaacctcttgttattttggcaccacacgctgttgaggcacttgtgaagcagccacctgataggtggttgtcaaacgcaagaatgacccattatcaagctcttcttttggatactgatagggtgcagttcggtcctgttgtggctttgaatccagcaacacttttgccacttcctgaggaaggattgcaacacaactgccttgatattttggctgaggcacatggtacaagacctgatcttaccgatcagccattgcctgatgctgatcacacttggtacacaaacggatcttcacttttgcaagaaggacagaggaaggctggtgctgcagttactacagagactgaagtgatttgggctaaggcacttccagctggaacatctgctcaaagagcagagcttattgctttgacccaggcacttaagatggctgaaggaaagaagttgaacgtttacactgattctaggtatgctttcgcaacagctcatattcacggagaaatctatagaaggagaggatggttgacatcagagggaaaggaaattaagaacaaggatgaaattcttgcacttttgaaggctctttttcttcctaagagattgtctattattcattgcccaggacaccaaaagggtcattcagcagaagctaggggaaatagaatggctgatcaggctgcaagaaaggctgcaattactgagacacctgatacctctactcttttgatcgaaaactcttcaccaaattcaaggcttattaac

SEQ ID NO: 378 - DNA, 2049 bp, Synthetic construct
  source 1..2049: mol_type = other DNA
acacttaatattgaggatgaacatagattgcacgagacctctaaggaacctgatgtttctcttggatcaacttggttgtcagatttcccacaagcatgggcagagaccggaggtatgggtcttgctgttaggcaggcaccacttattattcctttgaaggcaacctctactcctgtgtcaattaagcaatatccaaattctcaggaagctaggcttggaattaagcctcacattcaaagacttttggatcagggtattttggtgccatgtcaatcaccttggaacacaccacttttgcctgttaagaagcctggaactaatgattacagaccagtgcaagatttgagggaggttaacaagagagtggaagatattcacccaactgttccaaacccttataatcttttgtctggaggaccaccttcacatcaatggtacactgtgcttgatttgaaggatgcatttttctgccttaggttgcatccaacatctcagcctctttttgctttcgagtggagagatcctgaaatgggaatttctggtcaacttacatggaccaggttgcctcagggtttcaagaactcaccaaccttgtttaatgaggcacttcacagggatttggctgattttaggattcaacatcctgatcttatccttttgcagtatcttgatgatcttttgcttgctgcaacttctgaattggattgtcaacagggaactagggcattgcttcaaacacttggaaatttgggttacagagcttcagcaaagaaggctcagatttgccaaaagcaggttaagtatcttggatacttgcttaaggaaggacaaaggtggttgaccgaggctagaaaggaaactgtgatgggtcaaccaacacctaagacccctaggcagcttagagagttcttgggaaaggcaggtttttgtaggcttttcattccaggatttgctgaaatggctgcaccactttatcctttgaccaagcctggaactttgtttaactggggtccagatcaacagaaggcataccaagaaattaagcaggctttgcttactgctccagcacttggtttgcctgatcttacaaagccatttgagttgttcgttgatgaaaagcaaggatatgcaaagggtgtgcttacccagaagttgggaccttggagaaggcctgttgcttacctttctaagaaacttgatccagtggctgcaggttggccaccttgtcttagaatggttgctgcaattgcagtgcttacaaaggatgctggaaagttgactatgggacaacctcttgttattttggcaccacacgctgttgaggcacttgtgaagcagccacctgataggtggttgtcaaacgcaagaatgacccattatcaagctcttcttttggatactgatagggtgcagttcggtcctgttgtggctttgaatccagcaacacttttgccacttcctgaggaaggattgcaacacaactgccttgatattttggctgaggcacatggtacaagacctgatcttaccgatcagccattgcctgatgctgatcacacttggtacacagatggatcttcacttttgcaagaaggacagaggaaggctggtgctgcagttactacagagactgaagtgatttgggctaaggcacttccagctggaacatctgctcaaagagcagagcttattgctttgacccaggcacttaagatggctgaaggaaagaagttgaacgtttacactgattctaggtatgctttcgcaacagctcatattcacggagaaatctatagaaggagaggatggttgacatcagagggaaaggaaattaagaacaaggatgaaattcttgcacttttgaaggctctttttcttcctaagagattgtctattattcattgcccaggacaccaaaagggtcattcagcagaagctaggggaaatagaatggctgatcaggctgcaagaaaggctgcaattactgagacacctgatacctctactcttttgatcgaaaactcttcaccaaattcaaggcttattaac

SEQ ID NO: 379 - DNA, 2049 bp, Synthetic construct
  source 1..2049: mol_type = other DNA
acacttaatattgaggatgaacatagattgcacgagacctctaaggaacctgatgtttctcttggatcaacttggttgtcagatttcccacaagcatgggcagagaccggaggtatgggtcttgctgttaggcaggcaccacttattattcctttgaaggcaacctctactcctgtgtcaattaagcaatatccaatgtctcaggaagctaggcttggaattaagcctcacattcaaagacttttggatcagggtattttggtgccatgtcaatcaccttggaacacaccacttttgcctgttaagaagcctggaactaatgattacagaccagtgcaagatttgagggaggttaacaagagagtggaagatattcacccaactgttccaaacccttataatcttttgtctggaggaccaccttcacatcaatggtacactgtgcttgatttgaaggatgcatttttctgccttaggttgactccaacatctcagcctctttttgctttcgagtggagagatcctgaaatgggaatttctggtcaacttacatggaccaggttgcctcagggtttcaagaactcaccaaccttgtttaatgaggcacttcacagggatttggctgattttaggattcaacatcctgatcttatccttttgcagtatcttgatgatcttttgcttgctgcaacttctgaattggattgtcaacagggaactagggcattgcttcaaacacttggaaatttgggttacagagcttcagcaaagaaggctcagatttgccaaaagcaggttaagtatcttggatacttgcttaaggaaggacaaaggtggttgaccgaggctagaaaggaaactgtgatgggtcaaccaacacctaagacccctaggcagcttagagagttcttgggaaaggcaggtttttgtaggcttttcattccaggatttgctgaaatggctgcaccactttatcctttgaccaagcctggaactttgtttaactggggtccagatcaacagaaggcataccaagaaattaagcaggctttgcttactgctccagcacttggtttgcctgatcttacaaagccatttgagttgttcgttgatgaaaagcaaggatatgcaaagggtgtgcttacccagaagttgggaccttggagaaggcctgttgcttacctttctaagaaacttgatccagtggctgcaggttggccaccttgtcttagaatggttgctgcaattgcagtgcttacaaaggatgctggaaagttgactatgggacaacctcttgttattttggcaccacacgctgttgaggcacttgtgaagcagccacctgataggtggttgtcaaacgcaagaatgacccattatcaagctcttcttttggatactgatagggtgcagttcggtcctgttgtggctttgaatccagcaacacttttgccacttcctgaggaaggattgcaacacaactgccttgatattttggctgaggcacatggtacaagacctgatcttaccgatcagccattgcctgatgctgatcacacttggtacacagatggatcttcacttttgcaagaaggacagaggaaggctggtgctgcagttactacagagactgaagtgatttgggctaaggcacttccagctggaacatctgctcaaagagcagagcttattgctttgacccaggcacttaagatggctgaaggaaagaagttgaacgtttacactgattctaggtatgctttcgcaacagctcatattcacggagaaatctatagaaggagaggatggttgacatcagagggaaaggaaattaagaacaaggatgaaattcttgcacttttgaaggctctttttcttcctaagagattgtctattattcattgcccaggacaccaaaagggtcattcagcagaagctaggggaaatagaatggctgatcaggctgcaagaaaggctgcaattactgagacacctgatacctctactcttttgatcgaaaactcttcaccaaattcaaggcttattaac

SEQ ID NO: 380 - DNA, 2049 bp, Synthetic construct
  source 1..2049: mol_type = other DNA
acacttaatattgaggatgaacatagattgcacgagacctctaaggaacctgatgtttctcttggatcaacttggttgtcagatttcccacaagcatgggcagagaccggaggtatgggtcttgctgttaggcaggcaccacttattattcctttgaaggcaacctctactcctgtgtcaattaagcaatatccaatgtctcaggaagctaggcttggaattaagcctcacattcaaagacttttggatcagggtattttggtgccatgtcaatcaccttggaacacaccacttttgcctgttaagaagcctggaactaatgattacagaccagtgcaagatttgagggaggttaacaagagagtggaagatattcacccaactgttccaaacccttataatcttttgtctggaggaccaccttcacatcaatggtacactgtgcttgatttgaaggatgcatttttctgccttaggttgcatccaacatctcagcctctttttgctttctattggagagatcctgaaatgggaatttctggtcaacttacatggaccaggttgcctcagggtttcaagaactcaccaaccttgtttaatgaggcacttcacagggatttggctgattttaggattcaacatcctgatcttatccttttgcagtatcttgatgatcttttgcttgctgcaacttctgaattggattgtcaacagggaactagggcattgcttcaaacacttggaaatttgggttacagagcttcagcaaagaaggctcagatttgccaaaagcaggttaagtatcttggatacttgcttaaggaaggacaaaggtggttgaccgaggctagaaaggaaactgtgatgggtcaaccaacacctaagacccctaggcagcttagagagttcttgggaaaggcaggtttttgtaggcttttcattccaggatttgctgaaatggctgcaccactttatcctttgaccaagcctggaactttgtttaactggggtccagatcaacagaaggcataccaagaaattaagcaggctttgcttactgctccagcacttggtttgcctgatcttacaaagccatttgagttgttcgttgatgaaaagcaaggatatgcaaagggtgtgcttacccagaagttgggaccttggagaaggcctgttgcttacctttctaagaaacttgatccagtggctgcaggttggccaccttgtcttagaatggttgctgcaattgcagtgcttacaaaggatgctggaaagttgactatgggacaacctcttgttattttggcaccacacgctgttgaggcacttgtgaagcagccacctgataggtggttgtcaaacgcaagaatgacccattatcaagctcttcttttggatactgatagggtgcagttcggtcctgttgtggctttgaatccagcaacacttttgccacttcctgaggaaggattgcaacacaactgccttgatattttggctgaggcacatggtacaagacctgatcttaccgatcagccattgcctgatgctgatcacacttggtacacagatggatcttcacttttgcaagaaggacagaggaaggctggtgctgcagttactacagagactgaagtgatttgggctaaggcacttccagctggaacatctgctcaaagagcagagcttattgctttgacccaggcacttaagatggctgaaggaaagaagttgaacgtttacactgattctaggtatgctttcgcaacagctcatattcacggagaaatctatagaaggagaggatggttgacatcagagggaaaggaaattaagaacaaggatgaaattcttgcacttttgaaggctctttttcttcctaagagattgtctattattcattgcccaggacaccaaaagggtcattcagcagaagctaggggaaatagaatggctgatcaggctgcaagaaaggctgcaattactgagacacctgatacctctactcttttgatcgaaaactcttcaccaaattcaaggcttattaac

SEQ ID NO: 381 - DNA, 2049 bp, Synthetic construct
  source 1..2049: mol_type = other DNA
acacttaatattgaggatgaacatagattgcacgagacctctaaggaacctgatgtttctcttggatcaacttggttgtcagatttcccacaagcatgggcagagaccggaggtatgggtcttgctgttaggcaggcaccacttattattcctttgaaggcaacctctactcctgtgtcaattaagcaatatccaaattctcaggaagctaggcttggaattaagcctcacattcaaagacttttggatcagggtattttggtgccatgtcaatcaccttggaacacaccacttttgcctgttaagaagcctggaactaatgattacagaccagtgcaagatttgagggaggttaacaagagagtggaagatattcacccaactgttccaaacccttataatcttttgtctggattgccaccttcacatcaatggtacactgtgcttgatttgaaggatgcatttttctgccttaggttgactccaacatctcagcctctttttgctttcgagtggagagatcctgaaatgggaatttctggtcaacttacatggaccaggttgcctcagggtttcaagaactcaccaaccttgtttaatgaggcacttcacagggatttggctgattttaggattcaacatcctgatcttatccttttgcagtatgttgatgatcttttgcttgctgcaacttctgaattggattgtcaacagggaactagggcattgcttcaaacacttggaaatttgggttacagagcttcagcaaagaaggctcagatttgccaaaagcaggttaagtatcttggatacttgcttaaggaaggacaaaggtggttgaccgaggctagaaaggaaactgtgatgggtcaaccaacacctaagacccctaggcagcttagagagttcttgggaaaggcaggtttttgtaggcttttcattccaggatttgctgaaatggctgcaccactttatcctttgaccaagcctggaactttgtttaactggggtccagatcaacagaaggcataccaagaaattaagcaggctttgcttactgctccagcacttggtttgcctgatcttacaaagccatttgagttgttcgttgatgaaaagcaaggatatgcaaagggtgtgcttacccagaagttgggaccttggagaaggcctgttgcttacctttctaagaaacttgatccagtggctgcaggttggccaccttgtcttagaatggttgctgcaattgcagtgcttacaaaggatgctggaaagttgactatgggacaacctcttgttattttggcaccacacgctgttgaggcacttgtgaagcagccacctgataggtggttgtcaaacgcaagaatgacccattatcaagctcttcttttggatactgatagggtgcagttcggtcctgttgtggctttgaatccagcaacacttttgccacttcctgaggaaggattgcaacacaactgccttgatattttggctgaggcacatggtacaagacctgatcttaccgatcagccattgcctgatgctgatcacacttggtacacagatggatcttcacttttgcaagaaggacagaggaaggctggtgctgcagttactacagagactgaagtgatttgggctaaggcacttccagctggaacatctgctcaaagagcagagcttattgctttgacccaggcacttaagatggctgaaggaaagaagttgaacgtttacactgattctaggtatgctttcgcaacagctcatattcacggagaaatctatagaaggagaggatggttgacatcagagggaaaggaaattaagaacaaggatgaaattcttgcacttttgaaggctctttttcttcctaagagattgtctattattcattgcccaggacaccaaaagggtcattcagcagaagctaggggaaatagaatggctgatcaggctgcaagaaaggctgcaattactgagacacctgatacctctactcttttgatcgaaaactcttcaccaaattcaaggcttattaac

SEQ ID NO: 382 - DNA, 2049 bp, Synthetic construct
  source 1..2049: mol_type = other DNA
acacttaatattgaggatgaacatagattgcacgagacctctaaggaacctgatgtttctcttggatcaacttggttgtcagatttcccacaagcatgggcagagaccggaggtatgggtcttgctgttaggcaggcaccacttattattcctttgaaggcaacctctactcctgtgtcaattaagcaatatccaaattctcaggaagctaggcttggaattaagcctcacattcaaagacttttggatcagggtattttggtgccatgtcaatcaccttggaacacaccacttttgcctgttaagaagcctggaactaatgattacagaccagtgcaagatttgagggaggttaacaagagagtggaagatattcacccaactgttccaaacccttataatcttttgtctggattgccaccttcacatcaatggtacactgtgcttgatttgaaggatgcatttttctgccttaggttgcatccaacatctcagcctctttttgctttctattggagagatcctgaaatgggaatttctggtcaacttacatggaccaggttgcctcagggtttcaagaactcaccaaccttgtttaatgaggcacttcacagggatttggctgattttaggattcaacatcctgatcttatccttttgcagtatgttgatgatcttttgcttgctgcaacttctgaattggattgtcaacagggaactagggcattgcttcaaacacttggaaatttgggttacagagcttcagcaaagaaggctcagatttgccaaaagcaggttaagtatcttggatacttgcttaaggaaggacaaaggtggttgaccgaggctagaaaggaaactgtgatgggtcaaccaacacctaagacccctaggcagcttagagagttcttgggaaaggcaggtttttgtaggcttttcattccaggatttgctgaaatggctgcaccactttatcctttgaccaagcctggaactttgtttaactggggtccagatcaacagaaggcataccaagaaattaagcaggctttgcttactgctccagcacttggtttgcctgatcttacaaagccatttgagttgttcgttgatgaaaagcaaggatatgcaaagggtgtgcttacccagaagttgggaccttggagaaggcctgttgcttacctttctaagaaacttgatccagtggctgcaggttggccaccttgtcttagaatggttgctgcaattgcagtgcttacaaaggatgctggaaagttgactatgggacaacctcttgttattttggcaccacacgctgttgaggcacttgtgaagcagccacctgataggtggttgtcaaacgcaagaatgacccattatcaagctcttcttttggatactgatagggtgcagttcggtcctgttgtggctttgaatccagcaacacttttgccacttcctgaggaaggattgcaacacaactgccttgatattttggctgaggcacatggtacaagacctgatcttaccgatcagccattgcctgatgctgatcacacttggtacacagatggatcttcacttttgcaagaaggacagaggaaggctggtgctgcagttactacagagactgaagtgatttgggctaaggcacttccagctggaacatctgctcaaagagcagagcttattgctttgacccaggcacttaagatggctgaaggaaagaagttgaacgtttacactgattctaggtatgctttcgcaacagctcatattcacggagaaatctatagaaggagaggatggttgacatcagagggaaaggaaattaagaacaaggatgaaattcttgcacttttgaaggctctttttcttcctaagagattgtctattattcattgcccaggacaccaaaagggtcattcagcagaagctaggggaaatagaatggctgatcaggctgcaagaaaggctgcaattactgagacacctgatacctctactcttttgatcgaaaactcttcaccaaattcaaggcttattaac

SEQ ID NO: 383 - DNA, 2049 bp, Synthetic construct
  source 1..2049: mol_type = other DNA
acacttaatattgaggatgaacatagattgcacgagacctctaaggaacctgatgtttctcttggatcaacttggttgtcagatttcccacaagcatgggcagagaccggaggtatgggtcttgctgttaggcaggcaccacttattattcctttgaaggcaacctctactcctgtgtcaattaagcaatatccaatgtctcaggaagctaggcttggaattaagcctcacattcaaagacttttggatcagggtattttggtgccatgtcaatcaccttggaacacaccacttttgcctgttaagaagcctggaactaatgattacagaccagtgcaagatttgagggaggttaacaagagagtggaagatattcacccaactgttccaaacccttataatcttttgtctggattgccaccttcacatcaatggtacactgtgcttgatttgaaggatgcatttttctgccttaggttgactccaacatctcagcctctttttgctttctattggagagatcctgaaatgggaatttctggtcaacttacatggaccaggttgcctcagggtttcaagaactcaccaaccttgtttaatgaggcacttcacagggatttggctgattttaggattcaacatcctgatcttatccttttgcagtatgttgatgatcttttgcttgctgcaacttctgaattggattgtcaacagggaactagggcattgcttcaaacacttggaaatttgggttacagagcttcagcaaagaaggctcagatttgccaaaagcaggttaagtatcttggatacttgcttaaggaaggacaaaggtggttgaccgaggctagaaaggaaactgtgatgggtcaaccaacacctaagacccctaggcagcttagagagttcttgggaaaggcaggtttttgtaggcttttcattccaggatttgctgaaatggctgcaccactttatcctttgaccaagcctggaactttgtttaactggggtccagatcaacagaaggcataccaagaaattaagcaggctttgcttactgctccagcacttggtttgcctgatcttacaaagccatttgagttgttcgttgatgaaaagcaaggatatgcaaagggtgtgcttacccagaagttgggaccttggagaaggcctgttgcttacctttctaagaaacttgatccagtggctgcaggttggccaccttgtcttagaatggttgctgcaattgcagtgcttacaaaggatgctggaaagttgactatgggacaacctcttgttattttggcaccacacgctgttgaggcacttgtgaagcagccacctgataggtggttgtcaaacgcaagaatgacccattatcaagctcttcttttggatactgatagggtgcagttcggtcctgttgtggctttgaatccagcaacacttttgccacttcctgaggaaggattgcaacacaactgccttgatattttggctgaggcacatggtacaagacctgatcttaccgatcagccattgcctgatgctgatcacacttggtacacagatggatcttcacttttgcaagaaggacagaggaaggctggtgctgcagttactacagagactgaagtgatttgggctaaggcacttccagctggaacatctgctcaaagagcagagcttattgctttgacccaggcacttaagatggctgaaggaaagaagttgaacgtttacactgattctaggtatgctttcgcaacagctcatattcacggagaaatctatagaaggagaggatggttgacatcagagggaaaggaaattaagaacaaggatgaaattcttgcacttttgaaggctctttttcttcctaagagattgtctattattcattgcccaggacaccaaaagggtcattcagcagaagctaggggaaatagaatggctgatcaggctgcaagaaaggctgcaattactgagacacctgatacctctactcttttgatcgaaaactcttcaccaaattcaaggcttattaac

SEQ ID NO: 384 - DNA, 2049 bp, Synthetic construct
  source 1..2049: mol_type = other DNA
acacttaatattgaggatgaacatagattgcacgagacctctaaggaacctgatgtttctcttggatcaacttggttgtcagatttcccacaagcatgggcagagaccggaggtatgggtcttgctgttaggcaggcaccacttattattcctttgaaggcaacctctactcctgtgtcaattaagcaatatccaaattctcaggaagctaggcttggaattaagcctcacattcaaagacttttggatcagggtattttggtgccatgtcaatcaccttggaacacaccacttttgcctgttaagaagcctggaactaatgattacagaccagtgcaagatttgagggaggttaacaagagagtggaagatattcacccaactgttccaaacccttataatcttttgtctggattgccaccttcacatcaatggtacactgtgcttgatttgaaggatgcatttttctgccttaggttgactccaacatctcagcctctttttgctttctattggagagatcctgaaatgggaatttctggtcaacttacatggaccaggttgcctcagggtttcaagaactcaccaaccttgtttaatgaggcacttcacagggatttggctgattttaggattcaacatcctgatcttatccttttgcagtatgttgatgatcttttgcttgctgcaacttctgaattggattgtcaacagggaactagggcattgcttcaaacacttggaaatttgggttacagagcttcagcaaagaaggctcagatttgccaaaagcaggttaagtatcttggatacttgcttaaggaaggacaaaggtggttgaccgaggctagaaaggaaactgtgatgggtcaaccaacacctaagacccctaggcagcttagagagttcttgggaaaggcaggtttttgtaggcttttcattccaggatttgctgaaatggctgcaccactttatcctttgaccaagcctggaactttgtttaactggggtccagatcaacagaaggcataccaagaaattaagcaggctttgcttactgctccagcacttggtttgcctgatcttacaaagccatttgagttgttcgttgatgaaaagcaaggatatgcaaagggtgtgcttacccagaagttgggaccttggagaaggcctgttgcttacctttctaagaaacttgatccagtggctgcaggttggccaccttgtcttagaatggttgctgcaattgcagtgcttacaaaggatgctggaaagttgactatgggacaacctcttgttattttggcaccacacgctgttgaggcacttgtgaagcagccacctgataggtggttgtcaaacgcaagaatgacccattatcaagctcttcttttggatactgatagggtgcagttcggtcctgttgtggctttgaatccagcaacacttttgccacttcctgaggaaggattgcaacacaactgccttgatattttggctgaggcacatggtacaagacctgatcttaccgatcagccattgcctgatgctgatcacacttggtacacagatggatcttcacttttgcaagaaggacagaggaaggctggtgctgcagttactacagagactgaagtgatttgggctaaggcacttccagctggaacatctgctcaaagagcagagcttattgctttgacccaggcacttaagatggctgaaggaaagaagttgaacgtttacactgattctaggtatgctttcgcaacagctcatattcacggagaaatctatagaaggagaggatggttgacatcagagggaaaggaaattaagaacaaggatgaaattcttgcacttttgaaggctctttttcttcctaagagattgtctattattcattgcccaggacaccaaaagggtcattcagcagaagctaggggaaatagaatggctgatcaggctgcaagaaaggctgcaattactgagacacctgatacctctactcttttgatcgaaaactcttcaccaaattcaaggcttattaac

SEQ ID NO: 385 - DNA, 2049 bp, Synthetic construct
  source 1..2049: mol_type = other DNA
acacttaatattgaggatgaacatagattgcacgagacctctaaggaacctgatgtttctcttggatcaacttggttgtcagatttcccacaagcatgggcagagaccggaggtatgggtcttgctgttaggcaggcaccacttattattcctttgaaggcaacctctactcctgtgtcaattaagcaatatccaatgtctcaggaagctaggcttggaattaagcctcacattcaaagacttttggatcagggtattttggtgccatgtcaatcaccttggaacacaccacttttgcctgttaagaagcctggaactaatgattacagaccagtgcaagatttgagggaggttaacaagagagtggaagatattcacccaactgttccaaacccttataatcttttgtctggaggaccaccttcacatcaatggtacactgtgcttgatttgaaggatgcatttttctgccttaggttgcatccaacatctcagcctctttttgctttcgagtggagagatcctgaaatgggaatttctggtcaacttacatggaccaggttgcctcagggtttcaagaactcaccaaccttgtttaatgaggcacttcacagggatttggctgattttaggattcaacatcctgatcttatccttttgcagtatcttgatgatcttttgcttgctgcaacttctgaattggattgtcaacagggaactagggcattgcttcaaacacttggaaatttgggttacagagcttcagcaaagaaggctcagatttgccaaaagcaggttaagtatcttggatacttgcttaaggaaggacaaaggtggttgaccgaggctagaaaggaaactgtgatgggtcaaccaacacctaagacccctaggcagcttagagagttcttgggaaaggcaggtttttgtaggcttttcattccaggatttgctgaaatggctgcaccactttatcctttgaccaagcctggaactttgtttaactggggtccagatcaacagaaggcataccaagaaattaagcaggctttgcttactgctccagcacttggtttgcctgatcttacaaagccatttgagttgttcgttgatgaaaagcaaggatatgcaaagggtgtgcttacccagaagttgggaccttggagaaggcctgttgcttacctttctaagaaacttgatccagtggctgcaggttggccaccttgtcttagaatggttgctgcaattgcagtgcttacaaaggatgctggaaagttgactatgggacaacctcttgttattttggcaccacacgctgttgaggcacttgtgaagcagccacctgataggtggttgtcaaacgcaagaatgacccattatcaagctcttcttttggatactgatagggtgcagttcggtcctgttgtggctttgaatccagcaacacttttgccacttcctgaggaaggattgcaacacaactgccttgatattttggctgaggcacatggtacaagacctgatcttaccgatcagccattgcctgatgctgatcacacttggtacacagatggatcttcacttttgcaagaaggacagaggaaggctggtgctgcagttactacagagactgaagtgatttgggctaaggcacttccagctggaacatctgctcaaagagcagagcttattgctttgacccaggcacttaagatggctgaaggaaagaagttgaacgtttacactgattctaggtatgctttcgcaacagctcatattcacggagaaatctatagaaggagaggatggttgacatcagagggaaaggaaattaagaacaaggatgaaattcttgcacttttgaaggctctttttcttcctaagagattgtctattattcattgcccaggacaccaaaagggtcattcagcagaagctaggggaaatagaatggctgatcaggctgcaagaaaggctgcaattactgagacacctgatacctctactcttttgatcgaaaactcttcaccaaattcaaggcttattaac

SEQ ID NO: 386 - DNA, 2049 bp, Synthetic construct
  source 1..2049: mol_type = other DNA
acacttaatattgaggatgaacatagattgcacgagacctctaaggaacctgatgtttctcttggatcaacttggttgtcagatttcccacaagcatgggcagagaccggaggtatgggtcttgctgttaggcaggcaccacttattattcctttgaaggcaacctctactcctgtgtcaattaagcaatatccaatgtctcaggaagctaggcttggaattaagcctcacattcaaagacttttggatcagggtattttggtgccatgtcaatcaccttggaacacaccacttttgcctgttaagaagcctggaactaatgattacagaccagtgcaagatttgagggaggttaacaagagagtggaagatattcacccaactgttccaaacccttataatcttttgtctggaggaccaccttcacatcaatggtacactgtgcttgatttgaaggatgcatttttctgccttaggttgactccaacatctcagcctctttttgctttcgagtggagagatcctgaaatgggaatttctggtcaacttacatggaccaggttgcctcagggtttcaagaactcaccaaccttgtttaatgaggcacttcacagggatttggctgattttaggattcaacatcctgatcttatccttttgcagtatgttgatgatcttttgcttgctgcaacttctgaattggattgtcaacagggaactagggcattgcttcaaacacttggaaatttgggttacagagcttcagcaaagaaggctcagatttgccaaaagcaggttaagtatcttggatacttgcttaaggaaggacaaaggtggttgaccgaggctagaaaggaaactgtgatgggtcaaccaacacctaagacccctaggcagcttagagagttcttgggaaaggcaggtttttgtaggcttttcattccaggatttgctgaaatggctgcaccactttatcctttgaccaagcctggaactttgtttaactggggtccagatcaacagaaggcataccaagaaattaagcaggctttgcttactgctccagcacttggtttgcctgatcttacaaagccatttgagttgttcgttgatgaaaagcaaggatatgcaaagggtgtgcttacccagaagttgggaccttggagaaggcctgttgcttacctttctaagaaacttgatccagtggctgcaggttggccaccttgtcttagaatggttgctgcaattgcagtgcttacaaaggatgctggaaagttgactatgggacaacctcttgttattttggcaccacacgctgttgaggcacttgtgaagcagccacctgataggtggttgtcaaacgcaagaatgacccattatcaagctcttcttttggatactgatagggtgcagttcggtcctgttgtggctttgaatccagcaacacttttgccacttcctgaggaaggattgcaacacaactgccttgatattttggctgaggcacatggtacaagacctgatcttaccgatcagccattgcctgatgctgatcacacttggtacacagatggatcttcacttttgcaagaaggacagaggaaggctggtgctgcagttactacagagactgaagtgatttgggctaaggcacttccagctggaacatctgctcaaagagcagagcttattgctttgacccaggcacttaagatggctgaaggaaagaagttgaacgtttacactgattctaggtatgctttcgcaacagctcatattcacggagaaatctatagaaggagaggatggttgacatcagagggaaaggaaattaagaacaaggatgaaattcttgcacttttgaaggctctttttcttcctaagagattgtctattattcattgcccaggacaccaaaagggtcattcagcagaagctaggggaaatagaatggctgatcaggctgcaagaaaggctgcaattactgagacacctgatacctctactcttttgatcgaaaactcttcaccaaattcaaggcttattaac

SEQ ID NO: 387 - DNA, 2049 bp, Synthetic construct
  source 1..2049: mol_type = other DNA
acacttaatattgaggatgaacatagattgcacgagacctctaaggaacctgatgtttctcttggatcaacttggttgtcagatttcccacaagcatgggcagagaccggaggtatgggtcttgctgttaggcaggcaccacttattattcctttgaaggcaacctctactcctgtgtcaattaagcaatatccaatgtctcaggaagctaggcttggaattaagcctcacattcaaagacttttggatcagggtattttggtgccatgtcaatcaccttggaacacaccacttttgcctgttaagaagcctggaactaatgattacagaccagtgcaagatttgagggaggttaacaagagagtggaagatattcacccaactgttccaaacccttataatcttttgtctggattgccaccttcacatcaatggtacactgtgcttgatttgaaggatgcatttttctgccttaggttgactccaacatctcagcctctttttgctttcgagtggagagatcctgaaatgggaatttctggtcaacttacatggaccaggttgcctcagggtttcaagaactcaccaaccttgtttaatgaggcacttcacagggatttggctgattttaggattcaacatcctgatcttatccttttgcagtatcttgatgatcttttgcttgctgcaacttctgaattggattgtcaacagggaactagggcattgcttcaaacacttggaaatttgggttacagagcttcagcaaagaaggctcagatttgccaaaagcaggttaagtatcttggatacttgcttaaggaaggacaaaggtggttgaccgaggctagaaaggaaactgtgatgggtcaaccaacacctaagacccctaggcagcttagagagttcttgggaaaggcaggtttttgtaggcttttcattccaggatttgctgaaatggctgcaccactttatcctttgaccaagcctggaactttgtttaactggggtccagatcaacagaaggcataccaagaaattaagcaggctttgcttactgctccagcacttggtttgcctgatcttacaaagccatttgagttgttcgttgatgaaaagcaaggatatgcaaagggtgtgcttacccagaagttgggaccttggagaaggcctgttgcttacctttctaagaaacttgatccagtggctgcaggttggccaccttgtcttagaatggttgctgcaattgcagtgcttacaaaggatgctggaaagttgactatgggacaacctcttgttattttggcaccacacgctgttgaggcacttgtgaagcagccacctgataggtggttgtcaaacgcaagaatgacccattatcaagctcttcttttggatactgatagggtgcagttcggtcctgttgtggctttgaatccagcaacacttttgccacttcctgaggaaggattgcaacacaactgccttgatattttggctgaggcacatggtacaagacctgatcttaccgatcagccattgcctgatgctgatcacacttggtacacagatggatcttcacttttgcaagaaggacagaggaaggctggtgctgcagttactacagagactgaagtgatttgggctaaggcacttccagctggaacatctgctcaaagagcagagcttattgctttgacccaggcacttaagatggctgaaggaaagaagttgaacgtttacactgattctaggtatgctttcgcaacagctcatattcacggagaaatctatagaaggagaggatggttgacatcagagggaaaggaaattaagaacaaggatgaaattcttgcacttttgaaggctctttttcttcctaagagattgtctattattcattgcccaggacaccaaaagggtcattcagcagaagctaggggaaatagaatggctgatcaggctgcaagaaaggctgcaattactgagacacctgatacctctactcttttgatcgaaaactcttcaccaaattcaaggcttattaac

SEQ ID NO: 388 - DNA, 2049 bp, Synthetic construct
  source 1..2049: mol_type = other DNA
acacttaatattgaggatgaacatagattgcacgagacctctaaggaacctgatgtttctcttggatcaacttggttgtcagatttcccacaagcatgggcagagaccggaggtatgggtcttgctgttaggcaggcaccacttattattcctttgaaggcaacctctactcctgtgtcaattaagcaatatccaacttctcaggaagctaggcttggaattaagcctcacattcaaagacttttggatcagggtattttggtgccatgtcaatcaccttggaacacaccacttttgcctgttaagaagcctggaactaatgattacagaccagtgcaagatttgagggaggttaacaagagagtggaagatattcacccaactgttccaaacccttataatcttttgtctggaggaccaccttcacatcaatggtacactgtgcttgatttgaaggatgcatttttctgccttaggttgactccaacatctcagcctctttttgctttctattggagagatcctgaaatgggaatttctggtcaacttacatggaccaggttgcctcagggtttcaagaactcaccaaccttgtttaatgaggcacttcacagggatttggctgattttaggattcaacatcctgatcttatccttttgcagtatcttgatgatcttttgcttgctgcaacttctgaattggattgtcaacagggaactagggcattgcttcaaacacttggaaatttgggttacagagcttcagcaaagaaggctcagatttgccaaaagcaggttaagtatcttggatacttgcttaaggaaggacaaaggtggttgaccgaggctagaaaggaaactgtgatgggtcaaccaacacctaagacccctaggcagcttagagagttcttgggaaaggcaggtttttgtaggcttttcattccaggatttgctgaaatggctgcaccactttatcctttgaccaagcctggaactttgtttaactggggtccagatcaacagaaggcataccaagaaattaagcaggctttgcttactgctccagcacttggtttgcctgatcttacaaagccatttgagttgttcgttgatgaaaagcaaggatatgcaaagggtgtgcttacccagaagttgggaccttggagaaggcctgttgcttacctttctaagaaacttgatccagtggctgcaggttggccaccttgtcttagaatggttgctgcaattgcagtgcttacaaaggatgctggaaagttgactatgggacaacctcttgttattttggcaccacacgctgttgaggcacttgtgaagcagccacctgataggtggttgtcaaacgcaagaatgacccattatcaagctcttcttttggatactgatagggtgcagttcggtcctgttgtggctttgaatccagcaacacttttgccacttcctgaggaaggattgcaacacaactgccttgatattttggctgaggcacatggtacaagacctgatcttaccgatcagccattgcctgatgctgatcacacttggtacacagatggatcttcacttttgcaagaaggacagaggaaggctggtgctgcagttactacagagactgaagtgatttgggctaaggcacttccagctggaacatctgctcaaagagcagagcttattgctttgacccaggcacttaagatggctgaaggaaagaagttgaacgtttacactgattctaggtatgctttcgcaacagctcatattcacggagaaatctatagaaggagaggatggttgacatcagagggaaaggaaattaagaacaaggatgaaattcttgcacttttgaaggctctttttcttcctaagagattgtctattattcattgcccaggacaccaaaagggtcattcagcagaagctaggggaaatagaatggctgatcaggctgcaagaaaggctgcaattactgagacacctgatacctctactcttttgatcgaaaactcttcaccaaattcaaggcttattaac

SEQ ID NO: 389 - DNA, 2049 bp, Synthetic construct
  source 1..2049: mol_type = other DNA
acacttaatattgaggatgaacatagattgcacgagacctctaaggaacctgatgtttctcttggatcaacttggttgtcagatttcccacaagcatgggcagagaccggaggtatgggtcttgctgttaggcaggcaccacttattattcctttgaaggcaacctctactcctgtgtcaattaagcaatatccaatgtctcaggaagctaggcttggaattaagcctcacattcaaagacttttggatcagggtattttggtgccatgtcaatcaccttggaacacaccacttttgcctgttaagaagcctggaactaatgattacagaccagtgcaagatttgagggaggttaacaagagagtggaagatattcacccaactgttccaaacccttataatcttttgtctggaggaccaccttcacatcaatggtacactgtgcttgatttgaaggatgcatttttctgccttaggttgactccaacatctcagcctctttttgctttctattggagagatcctgaaatgggaatttctggtcaacttacatggaccaggttgcctcagggtttcaagaactcaccaaccttgtttaatgaggcacttcacagggatttggctgattttaggattcaacatcctgatcttatccttttgcagtatcttgatgatcttttgcttgctgcaacttctgaattggattgtcaacagggaactagggcattgcttcaaacacttggaaatttgggttacagagcttcagcaaagaaggctcagatttgccaaaagcaggttaagtatcttggatacttgcttaaggaaggacaaaggtggttgaccgaggctagaaaggaaactgtgatgggtcaaccaacacctaagacccctaggcagcttagagagttcttgggaaaggcaggtttttgtaggcttttcattccaggatttgctgaaatggctgcaccactttatcctttgaccaagcctggaactttgtttaactggggtccagatcaacagaaggcataccaagaaattaagcaggctttgcttactgctccagcacttggtttgcctgatcttacaaagccatttgagttgttcgttgatgaaaagcaaggatatgcaaagggtgtgcttacccagaagttgggaccttggagaaggcctgttgcttacctttctaagaaacttgatccagtggctgcaggttggccaccttgtcttagaatggttgctgcaattgcagtgcttacaaaggatgctggaaagttgactatgggacaacctcttgttattttggcaccacacgctgttgaggcacttgtgaagcagccacctgataggtggttgtcaaacgcaagaatgacccattatcaagctcttcttttggatactgatagggtgcagttcggtcctgttgtggctttgaatccagcaacacttttgccacttcctgaggaaggattgcaacacaactgccttgatattttggctgaggcacatggtacaagacctgatcttaccgatcagccattgcctgatgctgatcacacttggtacacagatggatcttcacttttgcaagaaggacagaggaaggctggtgctgcagttactacagagactgaagtgatttgggctaaggcacttccagctggaacatctgctcaaagagcagagcttattgctttgacccaggcacttaagatggctgaaggaaagaagttgaacgtttacactgattctaggtatgctttcgcaacagctcatattcacggagaaatctatagaaggagaggatggttgacatcagagggaaaggaaattaagaacaaggatgaaattcttgcacttttgaaggctctttttcttcctaagagattgtctattattcattgcccaggacaccaaaagggtcattcagcagaagctaggggaaatagaatggctgatcaggctgcaagaaaggctgcaattactgagacacctgatacctctactcttttgatcgaaaactcttcaccaaattcaaggcttattaac

SEQ ID NO: 390 - DNA, 2049 bp, Synthetic construct
  source 1..2049: mol_type = other DNA
acacttaatattgaggatgaacatagattgcacgagacctctaaggaacctgatgtttctcttggatcaacttggttgtcagatttcccacaagcatgggcagagaccggaggtatgggtcttgctgttaggcaggcaccacttattattcctttgaaggcaacctctactcctgtgtcaattaagcaatatccaatgtctcaggaagctaggcttggaattaagcctcacattcaaagacttttggatcagggtattttggtgccatgtcaatcaccttggaacacaccacttttgcctgttaagaagcctggaactaatgattacagaccagtgcaagatttgagggaggttaacaagagagtggaagatattcacccaactgttccaaacccttataatcttttgtctggaatcccaccttcacatcaatggtacactgtgcttgatttgaaggatgcatttttctgccttaggttgtatccaacatctcagcctctttttgctttcgagtggagagatcctgaaatgggaatttctggtcaacttacatggaccaggttgcctcagggtttcaagaactcaccaaccttgtttaatgaggcacttcacagggatttggctgattttaggattcaacatcctgatcttatccttttgcagtatcttgatgatcttttgcttgctgcaacttctgaattggattgtcaacagggaactagggcattgcttcaaacacttggaaatttgggttacagagcttcagcaaagaaggctcagatttgccaaaagcaggttaagtatcttggatacttgcttaaggaaggacaaaggtggttgaccgaggctagaaaggaaactgtgatgggtcaaccaacacctaagacccctaggcagcttagagagttcttgggaaaggcaggtttttgtaggcttttcattccaggatttgctgaaatggctgcaccactttatcctttgaccaagcctggaactttgtttaactggggtccagatcaacagaaggcataccaagaaattaagcaggctttgcttactgctccagcacttggtttgcctgatcttacaaagccatttgagttgttcgttgatgaaaagcaaggatatgcaaagggtgtgcttacccagaagttgggaccttggagaaggcctgttgcttacctttctaagaaacttgatccagtggctgcaggttggccaccttgtcttagaatggttgctgcaattgcagtgcttacaaaggatgctggaaagttgactatgggacaacctcttgttattttggcaccacacgctgttgaggcacttgtgaagcagccacctgataggtggttgtcaaacgcaagaatgacccattatcaagctcttcttttggatactgatagggtgcagttcggtcctgttgtggctttgaatccagcaacacttttgccacttcctgaggaaggattgcaacacaactgccttgatattttggctgaggcacatggtacaagacctgatcttaccgatcagccattgcctgatgctgatcacacttggtacacagatggatcttcacttttgcaagaaggacagaggaaggctggtgctgcagttactacagagactgaagtgatttgggctaaggcacttccagctggaacatctgctcaaagagcagagcttattgctttgacccaggcacttaagatggctgaaggaaagaagttgaacgtttacactgattctaggtatgctttcgcaacagctcatattcacggagaaatctatagaaggagaggatggttgacatcagagggaaaggaaattaagaacaaggatgaaattcttgcacttttgaaggctctttttcttcctaagagattgtctattattcattgcccaggacaccaaaagggtcattcagcagaagctaggggaaatagaatggctgatcaggctgcaagaaaggctgcaattactgagacacctgatacctctactcttttgatcgaaaactcttcaccaaattcaaggcttattaac

SEQ ID NO: 391 - DNA, 2049 bp, Synthetic construct
  source 1..2049: mol_type = other DNA
acacttaatattgaggatgaacatagattgcacgagacctctaaggaacctgatgtttctcttggatcaacttggttgtcagatttcccacaagcatgggcagagaccggaggtatgggtcttgctgttaggcaggcaccacttattattcctttgaaggcaacctctactcctgtgtcaattaagcaatatccaatgtctcaggaagctaggcttggaattaagcctcacattcaaagacttttggatcagggtattttggtgccatgtcaatcaccttggaacacaccacttttgcctgttaagaagcctggaactaatgattacagaccagtgcaagatttgagggaggttaacaagagagtggaagatattcacccaactgttccaaacccttataatcttttgtctggaatcccaccttcacatcaatggtacactgtgcttgatttgaaggatgcatttttctgccttaggttgtatccaacatctcagcctctttttgctttcgagtggagagatcctgaaatgggaatttctggtcaacttacatggaccaggttgcctcagggtttcaagaactcaccaaccttgtttaatgaggcacttcacagggatttggctgattttaggattcaacatcctgatcttatccttttgcagtatatggatgatcttttgcttgctgcaacttctgaattggattgtcaacagggaactagggcattgcttcaaacacttggaaatttgggttacagagcttcagcaaagaaggctcagatttgccaaaagcaggttaagtatcttggatacttgcttaaggaaggacaaaggtggttgaccgaggctagaaaggaaactgtgatgggtcaaccaacacctaagacccctaggcagcttagagagttcttgggaaaggcaggtttttgtaggcttttcattccaggatttgctgaaatggctgcaccactttatcctttgaccaagcctggaactttgtttaactggggtccagatcaacagaaggcataccaagaaattaagcaggctttgcttactgctccagcacttggtttgcctgatcttacaaagccatttgagttgttcgttgatgaaaagcaaggatatgcaaagggtgtgcttacccagaagttgggaccttggagaaggcctgttgcttacctttctaagaaacttgatccagtggctgcaggttggccaccttgtcttagaatggttgctgcaattgcagtgcttacaaaggatgctggaaagttgactatgggacaacctcttgttattttggcaccacacgctgttgaggcacttgtgaagcagccacctgataggtggttgtcaaacgcaagaatgacccattatcaagctcttcttttggatactgatagggtgcagttcggtcctgttgtggctttgaatccagcaacacttttgccacttcctgaggaaggattgcaacacaactgccttgatattttggctgaggcacatggtacaagacctgatcttaccgatcagccattgcctgatgctgatcacacttggtacacagatggatcttcacttttgcaagaaggacagaggaaggctggtgctgcagttactacagagactgaagtgatttgggctaaggcacttccagctggaacatctgctcaaagagcagagcttattgctttgacccaggcacttaagatggctgaaggaaagaagttgaacgtttacactgattctaggtatgctttcgcaacagctcatattcacggagaaatctatagaaggagaggatggttgacatcagagggaaaggaaattaagaacaaggatgaaattcttgcacttttgaaggctctttttcttcctaagagattgtctattattcattgcccaggacaccaaaagggtcattcagcagaagctaggggaaatagaatggctgatcaggctgcaagaaaggctgcaattactgagacacctgatacctctactcttttgatcgaaaactcttcaccaaattcaaggcttattaac

SEQ ID NO: 392 - DNA, 2049 bp, Synthetic construct
  source 1..2049: mol_type = other DNA
acacttaatattgaggatgaacatagattgcacgagacctctaaggaacctgatgtttctcttggatcaacttggttgtcagatttcccacaagcatgggcagagaccggaggtatgggtcttgctgttaggcaggcaccacttattattcctttgaaggcaacctctactcctgtgtcaattaagcaatatccaatgtctcaggaagctaggcttggaattaagcctcacattcaaagacttttggatcagggtattttggtgccatgtcaatcaccttggaacacaccacttttgcctgttaagaagcctggaactaatgattacagaccagtgcaagatttgagggaggttaacaagagagtggaagatattcacccaactgttccaaacccttataatcttttgtctggaatcccaccttcacatcaatggtacactgtgcttgatttgaaggatgcatttttctgccttaggttgtatccaacatctcagcctctttttgctttcgagtggagagatcctgaaatgggaatttctggtcaacttacatggaccaggttgcctcagggtttcaagaactcaccaaccttgtttaatgaggcacttcacagggatttggctgattttaggattcaacatcctgatcttatccttttgcagtatgttgatgatcttttgcttgctgcaacttctgaattggattgtcaacagggaactagggcattgcttcaaacacttggaaatttgggttacagagcttcagcaaagaaggctcagatttgccaaaagcaggttaagtatcttggatacttgcttaaggaaggacaaaggtggttgaccgaggctagaaaggaaactgtgatgggtcaaccaacacctaagacccctaggcagcttagagagttcttgggaaaggcaggtttttgtaggcttttcattccaggatttgctgaaatggctgcaccactttatcctttgaccaagcctggaactttgtttaactggggtccagatcaacagaaggcataccaagaaattaagcaggctttgcttactgctccagcacttggtttgcctgatcttacaaagccatttgagttgttcgttgatgaaaagcaaggatatgcaaagggtgtgcttacccagaagttgggaccttggagaaggcctgttgcttacctttctaagaaacttgatccagtggctgcaggttggccaccttgtcttagaatggttgctgcaattgcagtgcttacaaaggatgctggaaagttgactatgggacaacctcttgttattttggcaccacacgctgttgaggcacttgtgaagcagccacctgataggtggttgtcaaacgcaagaatgacccattatcaagctcttcttttggatactgatagggtgcagttcggtcctgttgtggctttgaatccagcaacacttttgccacttcctgaggaaggattgcaacacaactgccttgatattttggctgaggcacatggtacaagacctgatcttaccgatcagccattgcctgatgctgatcacacttggtacacagatggatcttcacttttgcaagaaggacagaggaaggctggtgctgcagttactacagagactgaagtgatttgggctaaggcacttccagctggaacatctgctcaaagagcagagcttattgctttgacccaggcacttaagatggctgaaggaaagaagttgaacgtttacactgattctaggtatgctttcgcaacagctcatattcacggagaaatctatagaaggagaggatggttgacatcagagggaaaggaaattaagaacaaggatgaaattcttgcacttttgaaggctctttttcttcctaagagattgtctattattcattgcccaggacaccaaaagggtcattcagcagaagctaggggaaatagaatggctgatcaggctgcaagaaaggctgcaattactgagacacctgatacctctactcttttgatcgaaaactcttcaccaaattcaaggcttattaac

SEQ ID NO: 393 - DNA, 2049 bp, Synthetic construct
  source 1..2049: mol_type = other DNA
acacttaatattgaggatgaacatagattgcacgagacctctaaggaacctgatgtttctcttggatcaacttggttgtcagatttcccacaagcatgggcagagaccggaggtatgggtcttgctgttaggcaggcaccacttattattcctttgaaggcaacctctactcctgtgtcaattaagcaatatccaatgtctcaggaagctaggcttggaattaagcctcacattcaaagacttttggatcagggtattttggtgccatgtcaatcaccttggaacacaccacttttgcctgttaagaagcctggaactaatgattacagaccagtgcaagatttgagggaggttaacaagagagtggaagatattcacccaactgttccaaacccttataatcttttgtctggaatcccaccttcacatcaatggtacactgtgcttgatttgaaggatgcatttttctgccttaggttgcatccaacatctcagcctctttttgctttcgagtggagagatcctgaaatgggaatttctggtcaacttacatggaccaggttgcctcagggtttcaagaactcaccaaccttgtttaatgaggcacttcacagggatttggctgattttaggattcaacatcctgatcttatccttttgcagtatatggatgatcttttgcttgctgcaacttctgaattggattgtcaacagggaactagggcattgcttcaaacacttggaaatttgggttacagagcttcagcaaagaaggctcagatttgccaaaagcaggttaagtatcttggatacttgcttaaggaaggacaaaggtggttgaccgaggctagaaaggaaactgtgatgggtcaaccaacacctaagacccctaggcagcttagagagttcttgggaaaggcaggtttttgtaggcttttcattccaggatttgctgaaatggctgcaccactttatcctttgaccaagcctggaactttgtttaactggggtccagatcaacagaaggcataccaagaaattaagcaggctttgcttactgctccagcacttggtttgcctgatcttacaaagccatttgagttgttcgttgatgaaaagcaaggatatgcaaagggtgtgcttacccagaagttgggaccttggagaaggcctgttgcttacctttctaagaaacttgatccagtggctgcaggttggccaccttgtcttagaatggttgctgcaattgcagtgcttacaaaggatgctggaaagttgactatgggacaacctcttgttattttggcaccacacgctgttgaggcacttgtgaagcagccacctgataggtggttgtcaaacgcaagaatgacccattatcaagctcttcttttggatactgatagggtgcagttcggtcctgttgtggctttgaatccagcaacacttttgccacttcctgaggaaggattgcaacacaactgccttgatattttggctgaggcacatggtacaagacctgatcttaccgatcagccattgcctgatgctgatcacacttggtacacagatggatcttcacttttgcaagaaggacagaggaaggctggtgctgcagttactacagagactgaagtgatttgggctaaggcacttccagctggaacatctgctcaaagagcagagcttattgctttgacccaggcacttaagatggctgaaggaaagaagttgaacgtttacactgattctaggtatgctttcgcaacagctcatattcacggagaaatctatagaaggagaggatggttgacatcagagggaaaggaaattaagaacaaggatgaaattcttgcacttttgaaggctctttttcttcctaagagattgtctattattcattgcccaggacaccaaaagggtcattcagcagaagctaggggaaatagaatggctgatcaggctgcaagaaaggctgcaattactgagacacctgatacctctactcttttgatcgaaaactcttcaccaaattcaaggcttattaac

SEQ ID NO: 394 - DNA, 2049 bp, Synthetic construct
  source 1..2049: mol_type = other DNA
acacttaatattgaggatgaacatagattgcacgagacctctaaggaacctgatgtttctcttggatcaacttggttgtcagatttcccacaagcatgggcagagaccggaggtatgggtcttgctgttaggcaggcaccacttattattcctttgaaggcaacctctactcctgtgtcaattaagcaatatccaatgtctcaggaagctaggcttggaattaagcctcacattcaaagacttttggatcagggtattttggtgccatgtcaatcaccttggaacacaccacttttgcctgttaagaagcctggaactaatgattacagaccagtgcaagatttgagggaggttaacaagagagtggaagatattcacccaactgttccaaacccttataatcttttgtctggattgccaccttcacatcaatggtacactgtgcttgatttgaaggatgcatttttctgccttaggttgcatccaacatctcagcctctttttgctttcgagtggagagatcctgaaatgggaatttctggtcaacttacatggaccaggttgcctcagggtttcaagaactcaccaaccttgtttaatgaggcacttcacagggatttggctgattttaggattcaacatcctgatcttatccttttgcagtatgttgatgatcttttgcttgctgcaacttctgaattggattgtcaacagggaactagggcattgcttcaaacacttggaaatttgggttacagagcttcagcaaagaaggctcagatttgccaaaagcaggttaagtatcttggatacttgcttaaggaaggacaaaggtggttgaccgaggctagaaaggaaactgtgatgggtcaaccaacacctaagacccctaggcagcttagagagttcttgggaaaggcaggtttttgtaggcttttcattccaggatttgctgaaatggctgcaccactttatcctagaaccaagcctggaactttgtttaactggggtccagatcaacagaaggcataccaagaaattaagcaggctttgcttactgctccagcacttggtttgcctgatcttacaaagccatttgagttgttcgttgatgaaaagcaaggatatgcaaagggtgtgcttacccagaagttgggaccttggagaaggcctgttgcttacctttctaagaaacttgatccagtggctgcaggttggccaccttgtcttagaatggttgctgcaattgcagtgcttacaaaggatgctggaaagttgactatgggacaacctcttgttattttggcaccacacgctgttgaggcacttgtgaagcagccacctgataggtggttgtcaaacgcaagaatgacccattatcaagctcttcttttggatactgatagggtgcagttcggtcctgttgtggctttgaatccagcaacacttttgccacttcctgaggaaggattgcaacacaactgccttgatattttggctgaggcacatggtacaagacctgatcttaccgatcagccattgcctgatgctgatcacacttggtacacagatggatcttcacttttgcaagaaggacagaggaaggctggtgctgcagttactacagagactgaagtgatttgggctaaggcacttccagctggaacatctgctcaaagagcagagcttattgctttgacccaggcacttaagatggctgaaggaaagaagttgaacgtttacactgattctaggtatgctttcgcaacagctcatattcacggagaaatctatagaaggagaggatggttgacatcagagggaaaggaaattaagaacaaggatgaaattcttgcacttttgaaggctctttttcttcctaagagattgtctattattcattgcccaggacaccaaaagggtcattcagcagaagctaggggaaatagaatggctgatcaggctgcaagaaaggctgcaattactgagacacctgatacctctactcttttgatcgaaaactcttcaccaaattcaaggcttattaac

SEQ ID NO: 395 - DNA, 2049 bp, Synthetic construct
  source 1..2049: mol_type = other DNA
acacttaatattgaggatgaacatagattgcacgagacctctaaggaacctgatgtttctcttggatcaacttggttgtcagatttcccacaagcatgggcagagaccggaggtatgggtcttgctgttaggcaggcaccacttattattcctttgaaggcaacctctactcctgtgtcaattaagcaatatccaatgtctcaggaagctaggcttggaattaagcctcacattcaaagacttttggatcagggtattttggtgccatgtcaatcaccttggaacacaccacttttgcctgttaagaagcctggaactaatgattacagaccagtgcaagatttgagggaggttaacaagagagtggaagatattcacccaactgttccaaacccttataatcttttgtctggattgccaccttcacatcaatggtacactgtgcttgatttgaaggatgcatttttctgccttaggttgcatccaacatctcagcctctttttgctttcgagtggagagatcctgaaatgggaatttctggtcaacttacatggaccaggttgcctcagggtttcaagaactcaccaaccttgtttaatgaggcacttcacagggatttggctgattttaggattcaacatcctgatcttatccttttgagatatgttgatgatcttttgcttgctgcaacttctgaattggattgtcaacagggaactagggcattgcttcaaacacttggaaatttgggttacagagcttcaacaaagaaggctcagatttgccaaaagcaggttaagtatcttggatacttgcttaaggaaggacaaaggtggttgaccgaggctagaaaggaaactgtgcttggtcaaccaacacctaagacccctaggcagcttagagagttcttgggaaaggcaggtttttgtaggcttttcattccaggatttgctgaaatggctgcaccactttatcctttgaccaagcctggaactttgtttaactggggtccagatcaacagaaggcataccaagaaattaagcaggctttgcttactgctccagcacttggtttgcctgatcttacaaagccatttgagttgttcgttgatgaaaagcaaggatatgcaaagggtgtgcttacccagaagttgggaccttggagaaggcctgttgcttacctttctaagaaacttgatccagtggctgcaggttggccaccttgtcttagaatggttgctgcaattgcagtgcttacaaaggatgctggaaagttgactatgggacaacctcttgttattttggcaccacacgctgttgaggcacttgtgaagcagccacctgataggtggttgtcaaacgcaagaatgacccattatcaagctcttcttttggatactgatagggtgcagttcggtcctgttgtggctttgaatccagcaacacttttgccacttcctgaggaaggattgcaacacaactgccttgatattttggctgaggcacatggtacaagacctgatcttaccgatcagccattgcctgatgctgatcacacttggtacacagatggatcttcacttttgcaagaaggacagaggaaggctggtgctgcagttactacagagactgaagtgatttgggctaaggcacttccagctggaacatctgctcaaagagcagagcttattgctttgacccaggcacttaagatggctgaaggaaagaagttgaacgtttacactgattctaggtatgctttcgcaacagctcatattcacggagaaatctatagaaggagaggatggttgacatcagagggaaaggaaattaagaacaaggatgaaattcttgcacttttgaaggctctttttcttcctaagagattgtctattattcattgcccaggacaccaaaagggtcattcagcagaagctaggggaaatagaatggctgatcaggctgcaagaaaggctgcaattactgagacacctgatacctctactcttttgatcgaaaactcttcaccaaattcaaggcttattaac

SEQ ID NO: 396 - DNA, 2049 bp, Synthetic construct
  source 1..2049: mol_type = other DNA
acacttaatattgaggatgaacatagattgcacgagacctctaaggaacctgatgtttctcttggatcaacttggttgtcagatttcccacaagcatgggcagagaccggaggtatgggtcttgctgttaggcaggcaccacttattattcctttgaaggcaacctctactcctgtgtcaattaagcaatatccaatgtctcaggaagctaggcttggaattaagcctcacattcaaagacttttggatcagggtattttggtgccatgtcaatcaccttggaacacaccacttttgcctgttaagaagcctggaactaatgattacagaccagtgcaagatttgagggaggttaacaagagagtggaagatattcacccaactgttccaaacccttataatcttttgtctggattgccaccttcacatcaatggtacactgtgcttgatttgaaggatgcatttttctgccttaggttgcatccaacatctcagcctctttttgctttcgagtggagagatcctgaaatgggaatttctggtcaacttacatggaccaggttgcctcagggtttcaagaactcaccaaccttgtttaatgaggcacttcacagggatttggctgattttaggattcaacatcctgatcttatccttttgagatatgttgatgatcttttgcttgctgcaacttctgaattggattgtcaacagggaactagggcattgcttcaaacacttggaaatttgggttacagagcttcagcaaagaaggctcagatttgccaaaagcaggttaagtatcttggatacttgcttaaggaaggacaaaggtggttgaccgaggctagaaaggaaactgtgatgggtcaaccaacacctaagacccctaggcagcttagagagttcttgggaaaggcaggtttttgtaggcttttcattccaggatttgctgaaatggctgcaccactttatcctttgaccaagcctggaactttgtttaactggggtccagatcaacagaaggcataccaagaaattaagcaggctttgcttactgctccagcacttggtttgcctgatcttacaaagccatttgagttgttcgttgatgaaaagcaaggatatgcaaagggtgtgcttacccagaagttgggaccttggagaaggcctgttgcttacctttctaagaaacttgatccagtggctgcaggttggccaccttgtcttagaatggttgctgcaattgcagtgcttacaaaggatgctggaaagttgactatgggacaacctcttgttattttggcaccacacgctgttgaggcacttgtgaagcagccacctgataggtggttgtcaaacgcaagaatgacccattatcaagctcttcttttggatactgatagggtgcagttcggtcctgttgtggctttgaatccagcaacacttttgccacttcctgaggaaggattgcaacacaactgccttgatattttggctgaggcacatggtacaagacctgatcttaccgatcagccattgcctgatgctgatcacacttggtacacagatggatcttcacttttgcaagaaggacagaggaaggctggtgctgcagttactacagagactgaagtgatttgggctaaggcacttccagctggaacatctgctcaaagagcagagcttattgctttgacccaggcacttaagatggctgaaggaaagaagttgaacgtttacactgattctaggtatgctttcgcaacagctcatattcacggagaaatctatagaaggagaggatggttgacatcagagggaaaggaaattaagaacaaggatgaaattcttgcacttttgaaggctctttttcttcctaagagattgtctattattcattgcccaggacaccaaaagggtcattcagcagaagctaggggaaatagaatggctgatcaggctgcaagaaaggctgcaattactgagacacctgatacctctactcttttgatcgaaaactcttcaccaaattcaaggcttattaac

SEQ ID NO: 397 - DNA, 2049 bp, Synthetic construct
  source 1..2049: mol_type = other DNA
acacttaatattgaggatgaacatagattgcacgagacctctaaggaacctgatgtttctcttggatcaacttggttgtcagatttcccacaagcatgggcagagaccggaggtatgggtcttgctgttaggcaggcaccacttattattcctttgaaggcaacctctactcctgtgtcaattaagcaatatccaatgtctcaggaagctaggcttggaattaagcctcacattcaaagacttttggatcagggtattttggtgccatgtcaatcaccttggaacacaccacttttgcctgttaagaagcctggaactaatgattacagaccagtgcaagatttgagggaggttaacaagagagtggaagatattcacccaactgttccaaacccttataatcttttgtctggattgccaccttcacatcaatggtacactgtgcttgatttgaaggatgcatttttctgccttaggttgcatccaacatctcagcctctttttgctttcgagtggagagatcctgaaatgggaatttctgatcaacttacatggaccaggttgcctcagggtttcaagaactcaccaaccttgtttaatgaggcacttcacagggatttggctgattttaggattcaacatcctgatcttatccttttgcagtatgttgatgatcttttgcttgctgcaacttctgaattggattgtcaacagggaactagggcattgcttcaaacacttggaaatttgggttacagagcttcagcaaagaaggctcagatttgccaaaagcaggttaagtatcttggatacttgcttaaggaaggacaaaggtggttgaccgaggctagaaaggaaactgtgatgggtcaaccaacacctaagacccctaggcagcttagagagttcttgggaaaggcaggtttttgtaggcttttcattccaggatttgctgaaatggctgcaccactttatcctttgaccaagcctggaactttgtttaactggggtccagatcaacagaaggcataccaagaaattaagcaggctttgcttactgctccagcacttggtttgcctgatcttacaaagccatttgagttgttcgttgatgaaaagcaaggatatgcaaagggtgtgcttacccagaagttgggaccttggagaaggcctgttgcttacctttctaagaaacttgatccagtggctgcaggttggccaccttgtcttagaatggttgctgcaattgcagtgcttacaaaggatgctggaaagttgactatgggacaacctcttgttattttggcaccacacgctgttgaggcacttgtgaagcagccacctgataggtggttgtcaaacgcaagaatgacccattatcaagctcttcttttggatactgatagggtgcagttcggtcctgttgtggctttgaatccagcaacacttttgccacttcctgaggaaggattgcaacacaactgccttgatattttggctgaggcacatggtacaagacctgatcttaccgatcagccattgcctgatgctgatcacacttggtacacagatggatcttcacttttgcaagaaggacagaggaaggctggtgctgcagttactacagagactgaagtgatttgggctaaggcacttccagctggaacatctgctcaaagagcagagcttattgctttgacccaggcacttaagatggctgaaggaaagaagttgaacgtttacactgattctaggtatgctttcgcaacagctcatattcacggagaaatctatagaaggagaggatggttgacatcagagggaaaggaaattaagaacaaggatgaaattcttgcacttttgaaggctctttttcttcctaagagattgtctattattcattgcccaggacaccaaaagggtcattcagcagaagctaggggaaatagaatggctgatcaggctgcaagaaaggctgcaattactgagacacctgatacctctactcttttgatcgaaaactcttcaccaaattcaaggcttattaac

SEQ ID NO: 398 - DNA, 2049 bp, Synthetic construct
  source 1..2049: mol_type = other DNA
acacttaatattgaggatgaacatagattgcacgagacctctaaggaacctgatgtttctcttggatcaacttggttgtcagatttcccacaagcatgggcagagaccggaggtatgggtcttgctgttaggcaggcaccacttattattcctttgaaggcaacctctactcctgtgtcaattaagcaatatccaatgtctcaggaagctaggcttggaattaagcctcacattcaaagacttttggatcagggtattttggtgccatgtcaatcaccttggaacacaccacttttgcctgttaagaagcctggaactaatgattacagaccagtgcaagatttgagggaggttaacaagagagtggaagatattcacccaactgttccaaacccttataatcttttgtctggattgccaccttcacatcaatggtacactgatcttgatttgaaggatgcatttttctgccttaggttgcatccaacatctcagcctctttttgctttcgagtggagagatcctgaaatgggaatttctggtcaacttacatggaccaggttgcctcagggtttcaagaactcaccaaccttgtttaatgaggcacttcacagggatttggctgattttaggattcaacatcctgatcttatccttttgcagtatgttgatgatcttttgcttgctgcaacttctgaattggattgtcaacagggaactagggcattgcttcaaacacttggaaatttgggttacagagcttcagcaaagaaggctcagatttgccaaaagcaggttaagtatcttggatacttgcttaaggaaggacaaaggtggttgaccgaggctagaaaggaaactgtgatgggtcaaccaacacctaagacccctaggcagcttagagagttcttgggaaaggcaggtttttgtaggcttttcattccaggatttgctgaaatggctgcaccactttatcctttgaccaagcctggaactttgtttaactggggtccagatcaacagaaggcataccaagaaattaagcaggctttgcttactgctccagcacttggtttgcctgatcttacaaagccatttgagttgttcgttgatgaaaagcaaggatatgcaaagggtgtgcttacccagaagttgggaccttggagaaggcctgttgcttacctttctaagaaacttgatccagtggctgcaggttggccaccttgtcttagaatggttgctgcaattgcagtgcttacaaaggatgctggaaagttgactatgggacaacctcttgttattttggcaccacacgctgttgaggcacttgtgaagcagccacctgataggtggttgtcaaacgcaagaatgacccattatcaagctcttcttttggatactgatagggtgcagttcggtcctgttgtggctttgaatccagcaacacttttgccacttcctgaggaaggattgcaacacaactgccttgatattttggctgaggcacatggtacaagacctgatcttaccgatcagccattgcctgatgctgatcacacttggtacacagatggatcttcacttttgcaagaaggacagaggaaggctggtgctgcagttactacagagactgaagtgatttgggctaaggcacttccagctggaacatctgctcaaagagcagagcttattgctttgacccaggcacttaagatggctgaaggaaagaagttgaacgtttacactgattctaggtatgctttcgcaacagctcatattcacggagaaatctatagaaggagaggatggttgacatcagagggaaaggaaattaagaacaaggatgaaattcttgcacttttgaaggctctttttcttcctaagagattgtctattattcattgcccaggacaccaaaagggtcattcagcagaagctaggggaaatagaatggctgatcaggctgcaagaaaggctgcaattactgagacacctgatacctctactcttttgatcgaaaactcttcaccaaattcaaggcttattaac

SEQ ID NO: 399 - DNA, 2049 bp, Synthetic construct
  source 1..2049: mol_type = other DNA
acacttaatattgaggatgaacatagattgcacgagacctctaaggaacctgatgtttctcttggatcaacttggttgtcagatttcccacaagcatgggcagagaccggaggtatgggtcttgctgttaggcaggcaccacttattattcctttgaaggcaacctctactcctgtgtcaattaagcaatatccaatgtctcaggaagctaggcttggaattaagcctcacattcaaagacttttggatcagggtattttggtgccatgtcaatcaccttggaacacaccacttttgcctgttaagaagcctggaactaatgattacagaccagtgcaagatttgagggaggttaacaagagagtggaagatattcacccaactgttccaaacccttataatcttttgtctggattgccaccttcacatcaatggtacactgtgcttgatttgaaggatgcatttttctgccttaggttgcatccaacatctcagcctctttttgctttcgagtggagagatcctgaaatgggaatttctggtcaacttacatggaccaggttgcctcagggtttcaagaactcaccaaccttgtttaatgaggcacttcacagggatttggctgattttaggattcaacatcctgatcttatccttttgcagtatgttgatgatcttttgcttgctgtgacttctgaattggattgtcaacagggaactagggcattgcttcaaacacttggaaatttgggttacagagcttcagtgaagaaggctcagatttgccaaaagcaggttaagtatcttggatacttgcttaaggatggacaaaggtggttgaccgaggctagaaaggaaactgtgatgggtcaaccaacacctaagacccctaggcagcttagagagttcttgggaaaggcaggtttttgtaggcttttcattccaggatttgctgaaatggctgcaccactttatcctttgaccaagcctggaactttgtttaactggggtccagatcaacagaaggcataccaagaaattaagcaggctttgcttactgctccagcacttggtttgcctgatcttacaaagccatttgagttgttcgttgatgaaaagcaaggatatgcaaagggtgtgcttacccagaagttgggaccttggagaaggcctgttgcttacctttctaagaaacttgatccagtggctgcaggttggccaccttgtcttagaatggttgctgcaattgcagtgcttacaaaggatgctggaaagttgactatgggacaacctcttgttattttggcaccacacgctgttgaggcacttgtgaagcagccacctgataggtggttgtcaaacgcaagaatgacccattatcaagctcttcttttggatactgatagggtgcagttcggtcctgttgtggctttgaatccagcaacacttttgccacttcctgaggaaggattgcaacacaactgccttgatattttggctgaggcacatggtacaagacctgatcttaccgatcagccattgcctgatgctgatcacacttggtacacagatggatcttcacttttgcaagaaggacagaggaaggctggtgctgcagttactacagagactgaagtgatttgggctaaggcacttccagctggaacatctgctcaaagagcagagcttattgctttgacccaggcacttaagatggctgaaggaaagaagttgaacgtttacactgattctaggtatgctttcgcaacagctcatattcacggagaaatctatagaaggagaggatggttgacatcagagggaaaggaaattaagaacaaggatgaaattcttgcacttttgaaggctctttttcttcctaagagattgtctattattcattgcccaggacaccaaaagggtcattcagcagaagctaggggaaatagaatggctgatcaggctgcaagaaaggctgcaattactgagacacctgatacctctactcttttgatcgaaaactcttcaccaaattcaaggcttattaac

SEQ ID NO: 400 - DNA, 2049 bp, Synthetic construct
  source 1..2049: mol_type = other DNA
acacttaatattgaggatgaacatagattgcacgagacctctaaggaacctgatgtttctcttggatcaacttggttgtcagatttcccacaagcatgggcagagaccggaggtatgggtcttgctgttaggcaggcaccacttattattcctttgaaggcaacctctactcctgtgtcaattaagcaatatccaatgtctcaggaagctaggcttggaattaagcctcacattcaaagacttttggatcagggtattttggtgccatgtcaatcaccttggaacacaccacttttgcctgttaagaagcctggaactaatgattacagaccagtgcaagatttgagggaggttaacaagagagtggaagatattcacccaactgttccaaacccttataatcttttgtctggattgccaccttcacatcaatggtacactgtgcttgatttgaaggatgcatttttctgccttaggttgcatccaacatctcagcctctttttgctttcgagtggagagatcctgaaatgggaatttctggtcaacttacatggaccaggttgcctcagggtttcaagaactcaccaaccttgtttaatgaggcacttcacagggatttggctgattttaggattcaacatcctgatcttatccttttgcagtatgttgatgatcttttgcttgctgcaacttctgaattggatagacaacagggaactagggcattgcttcaaacacttggaaatttgggttacagagcttcagcaaagaaggctcagatttgccaaaagcaggttaagtatcttggatacttgcttaaggaaggacaaaggtggttgaccgaggctagaaaggaaactgtgatgggtcaaccaacacctaagacccctaggcagcttagagagttcttgggaaaggcaggtttttgtaggcttttcattccaggatttgctgaaatggctgcaccactttatcctttgaccaagcctggaactttgtttaactggggtccagatcaacagaaggcataccaagaaattaagcaggctttgcttactgctccagcacttggtttgcctgatcttacaaagccatttgagttgttcgttgatgaaaagcaaggatatgcaaagggtgtgcttacccagaagttgggaccttggagaaggcctgttgcttacctttctaagaaacttgatccagtggctgcaggttggccaccttgtcttagaatggttgctgcaattgcagtgcttacaaaggatgctggaaagttgactatgggacaacctcttgttattttggcaccacacgctgttgaggcacttgtgaagcagccacctgataggtggttgtcaaacgcaagaatgacccattatcaagctcttcttttggatactgatagggtgcagttcggtcctgttgtggctttgaatccagcaacacttttgccacttcctgaggaaggattgcaacacaactgccttgatattttggctgaggcacatggtacaagacctgatcttaccgatcagccattgcctgatgctgatcacacttggtacacagatggatcttcacttttgcaagaaggacagaggaaggctggtgctgcagttactacagagactgaagtgatttgggctaaggcacttccagctggaacatctgctcaaagagcagagcttattgctttgacccaggcacttaagatggctgaaggaaagaagttgaacgtttacactgattctaggtatgctttcgcaacagctcatattcacggagaaatctatagaaggagaggatggttgacatcagagggaaaggaaattaagaacaaggatgaaattcttgcacttttgaaggctctttttcttcctaagagattgtctattattcattgcccaggacaccaaaagggtcattcagcagaagctaggggaaatagaatggctgatcaggctgcaagaaaggctgcaattactgagacacctgatacctctactcttttgatcgaaaactcttcaccaaattcaaggcttattaac

SEQ ID NO: 401 - DNA, 2049 bp, Synthetic construct
  source 1..2049: mol_type = other DNA
acacttaatattgaggatgaacatagattgcacgagacctctaaggaacctgatgtttctcttggatcaacttggttgtcagatttcccacaagcatgggcagagaccggaggtatgggtcttgctgttaggcaggcaccacttattattcctttgaaggcaacctctactcctgtgtcaattaagcaatatccaatgtctcaggaagctaggcttggaattaagcctcacattcaaagacttttggatcagggtattttggtgccatgtcaatcaccttggaacacaccacttttgcctgttaagaagcctggaactaatgattacagaccagtgcaagatttgagggaggttaacaagagagtggaagatattcacccaactgttccaaacccttataatcttttgtctggattgccaccttcacatcaatggtacactgtgcttgatttgaaggatgcatttttctgccttaggttgcatccaacatctcagcctctttttgctttcgagtggagagatcctgaaatgggaatttctggtcaacttacatggaccaggttgcctcagggtttcaagaactcaccaaccttgtttaatgaggcacttcacagggatttggctgattttaggattcaacatcctgatcttatccttttgcagtatgttgatgatcttttgcttgctgcaacttctgaattggattgtcaacagggaactagggcattgcttcaaacacttggaaatttgggtcatagagcttcagcaaagaaggctcagatttgccaaaagcaggttaagtatcttggatacttgcttaaggaaggacaaaggtggttgaccgaggctagaaaggaaactgtgatgggtcaaccaacacctaagacccctaggcagcttagagagttcttgggaaaggcaggtttttgtaggcttttcattccaggatttgctgaaatggctgcaccacttttccctttgaccaagcctggagctttgttttattggggtccagatcaacagaaggcataccaagaaattaagcaggctttgcttactgctccagcacttggtttgcctgatcttacaaagccatttgagttgttcgttgatgaaaagcaaggatatgcaaagggtgtgcttacccagaagttgggaccttggagaaggcctgttgcttacctttctaagaaacttgatccagtggctgcaggttggccaccttgtcttagaatggttgctgcaattgcagtgcttacaaaggatgctggaaagttgactatgggacaacctcttgttattttggcaccacacgctgttgaggcacttgtgaagcagccacctgataggtggttgtcaaacgcaagaatgacccattatcaagctcttcttttggatactgatagggtgcagttcggtcctgttgtggctttgaatccagcaacacttttgccacttcctgaggaaggattgcaacacaactgccttgatattttggctgaggcacatggtacaagacctgatcttaccgatcagccattgcctgatgctgatcacacttggtacacagatggatcttcacttttgcaagaaggacagaggaaggctggtgctgcagttactacagagactgaagtgatttgggctaaggcacttccagctggaacatctgctcaaagagcagagcttattgctttgacccaggcacttaagatggctgaaggaaagaagttgaacgtttacactgattctaggtatgctttcgcaacagctcatattcacggagaaatctatagaaggagaggatggttgacatcagagggaaaggaaattaagaacaaggatgaaattcttgcacttttgaaggctctttttcttcctaagagattgtctattattcattgcccaggacaccaaaagggtcattcagcagaagctaggggaaatagaatggctgatcaggctgcaagaaaggctgcaattactgagacacctgatacctctactcttttgatcgaaaactcttcaccaaattcaaggcttattaac

SEQ ID NO: 402 - DNA, 2049 bp, Synthetic construct
  source 1..2049: mol_type = other DNA
acacttaatattgaggatgaacatagattgcacgagacctctaaggaacctgatgtttctcttggatcaacttggttgtcagatttcccacaagcatgggcagagaccggaggtatgggtcttgctgttaggcaggcaccacttattattcctttgaaggcaacctctactcctgtgtcaattaagcaatatccaatgtctcaggaagctaggcttggaattaagcctcacattcaaagacttttggatcagggtattttggtgccatgtcaatcaccttggaacacaccacttttgcctgttaagaagcctggaactaatgattacagaccagtgcaagatttgagggaggttaacaagagagtggaagatattcacccaactgttccaaacccttataatcttttgtctggattgccaccttcacatcaatggtacactgtgcttgatttgaaggatgcatttttctgccttaggttgcatccaacatctcagcctctttttgctttcgagtggagagatcctgaaatgggaatttctggtcaacttacatggaccaggttgcctcagggtttcaagaactcaccaaccttgtttaatgaggcacttcacagggatttggctgattttaggattcaacatcctgatcttatccttttgcagtatgttgatgatcttttgcttgctgcaacttctgaattggattggcaacagggaactagggcattgcttcaaacacttggaaatttgggttacagagcttcagcaaagaaggctcagatttgccaaaagcaggttaagtatcttggatacttgcttaaggaaggacaaaggtggttgaccgaggctagaaaggaaactgtgatgggtcaaccaacacctaagacccctaggcagcttagagagttcttgggaaaggcaggtttttgtaggcttttcattccaggatttgctgaaatggctgcaccactttatcctttgaccaagcctggaactttgtttaactggggtccagatcaacagaaggcataccaagaaattaagcaggctttgcttactgctccagcacttggtttgcctgatcttacaaagccatttgagttgttcgttgatgaaaagcaaggatatgcaaagggtgtgcttacccagaagttgggaccttggagaaggcctgttgcttacctttctaagaaacttgatccagtggctgcaggttggccaccttgtcttagaatggttgctgcaattgcagtgcttacaaaggatgctggaaagttgactatgggacaacctcttgttattttggcaccacacgctgttgaggcacttgtgaagcagccacctgataggtggttgtcaaacgcaagaatgacccattatcaagctcttcttttggatactgatagggtgcagttcggtcctgttgtggctttgaatccagcaacacttttgccacttcctgaggaaggattgcaacacaactgccttgatattttggctgaggcacatggtacaagacctgatcttaccgatcagccattgcctgatgctgatcacacttggtacacagatggatcttcacttttgcaagaaggacagaggaaggctggtgctgcagttactacagagactgaagtgatttgggctaaggcacttccagctggaacatctgctcaaagagcagagcttattgctttgacccaggcacttaagatggctgaaggaaagaagttgaacgtttacactgattctaggtatgctttcgcaacagctcatattcacggagaaatctatagaaggagaggatggttgacatcagagggaaaggaaattaagaacaaggatgaaattcttgcacttttgaaggctctttttcttcctaagagattgtctattattcattgcccaggacaccaaaagggtcattcagcagaagctaggggaaatagaatggctgatcaggctgcaagaaaggctgcaattactgagacacctgatacctctactcttttgatcgaaaactcttcaccaaattcaaggcttattaac

SEQ ID NO: 403 - DNA, 2049 bp, Synthetic construct
  source 1..2049: mol_type = other DNA
acacttaatattgaggatgaacatagattgcacgagacctctaaggaacctgatgtttctcttggatcaacttggttgtcagatttcccacaagcatgggcagagaccggaggtatgggtcttgctgttaggcaggcaccacttattattcctttgaaggcaacctctactcctgtgtcaattaagcaatatccaatgtctcaggaagctaggcttggaattaagcctcacattcaaagacttttggatcagggtattttggtgccatgtcaatcaccttggaacacaccacttttgcctgttaagaagcctggaactaatgattacagaccagtgcaagatttgagggaggttaacaagagagtggaagatattcacccaactgttccaaacccttataatcttttgtctggattgccaccttcacatcaatggtacactgtgcttgatttgaaggatgcatttttctgccttaggttgcatccaacatctcagcctctttttgctttcgagtggagagatcctgaaatgggaatttctggtcaacttacatggaccaggttgcctcagggtttcaagaactcaccaaccttgtttaatgaggcacttcacagggatttggctgattttaggattcaacatcctgatcttatccttttgcagtatgttgatgatcttttgcttgctgcaacttctgaattggattctcaacagggaactagggcattgcttcaaacacttggaaatttgggttacagagcttcagcaaagaaggctcagatttgccaaaagcaggttaagtatcttggatacttgcttaaggaaggacaaaggtggttgaccgaggctagaaaggaaactgtgatgggtcaaccaacacctaagacccctaggcagcttagagagttcttgggaaaggcaggtttttgtaggcttttcattccaggatttgctgaaatggctgcaccactttatcctttgaccaagcctggaactttgtttaactggggtccagatcaacagaaggcataccaagaaattaagcaggctttgcttactgctccagcacttggtttgcctgatcttacaaagccatttgagttgttcgttgatgaaaagcaaggatatgcaaagggtgtgcttacccagaagttgggaccttggagaaggcctgttgcttacctttctaagaaacttgatccagtggctgcaggttggccaccttgtcttagaatggttgctgcaattgcagtgcttacaaaggatgctggaaagttgactatgggacaacctcttgttattttggcaccacacgctgttgaggcacttgtgaagcagccacctgataggtggttgtcaaacgcaagaatgacccattatcaagctcttcttttggatactgatagggtgcagttcggtcctgttgtggctttgaatccagcaacacttttgccacttcctgaggaaggattgcaacacaactgccttgatattttggctgaggcacatggtacaagacctgatcttaccgatcagccattgcctgatgctgatcacacttggtacacagatggatcttcacttttgcaagaaggacagaggaaggctggtgctgcagttactacagagactgaagtgatttgggctaaggcacttccagctggaacatctgctcaaagagcagagcttattgctttgacccaggcacttaagatggctgaaggaaagaagttgaacgtttacactgattctaggtatgctttcgcaacagctcatattcacggagaaatctatagaaggagaggatggttgacatcagagggaaaggaaattaagaacaaggatgaaattcttgcacttttgaaggctctttttcttcctaagagattgtctattattcattgcccaggacaccaaaagggtcattcagcagaagctaggggaaatagaatggctgatcaggctgcaagaaaggctgcaattactgagacacctgatacctctactcttttgatcgaaaactcttcaccaaattcaaggcttattaac

SEQ ID NO: 404 - DNA, 2049 bp, Synthetic construct
  source 1..2049: mol_type = other DNA
acacttaatattgaggatgaacatagattgcacgagacctctaaggaacctgatgtttctcttggatcaacttggttgtcagatttcccacaagcatgggcagagaccggaggtatgggtcttgctgttaggcaggcaccacttattattcctttgaaggcaacctctactcctgtgtcaattaagcaatatccaatgtctcaggaagctaggcttggaattaagcctcacattcaaagacttttggatcagggtattttggtgccatgtcaatcaccttggaacacaccacttttgcctgttaagaagcctggaactaatgattacagaccagtgcaagatttgagggaggttaacaagagagtggaagatattcacccaactgttccaaacccttataatcttttgtctggattgccaccttcacatcaatggtacactgtgcttgatttgaaggatgcatttttctgccttaggttgcatccaacatctcagcctctttttgctttcgagtggagagatcctgaaatgggaatttctggtcaacttacatggaccaggttgcctcagggtttcaagaactcaccaaccttgtttaatgaggcacttcacagggatttggctgattttaggattcaacatcctgatcttatccttttgcagtatgttgatgatcttttgcttgctgcaacttctgaattggattgtcaacagggaactagggcattgcttcaaacacttggaaatttgggttacagagcttcagcaaagaaggctcagatttgccaaaagcaggttaagtatcttggatacttgcttaaggaaggacaaaggtggttgaccgaggctagaaaggaaactgtgagaggtcaaccaacacctaagacccctaggcagcttagagagttcttgggaaaggcaggtttttgtaggcttttcattccaggatttgctgaaatggctgcaccactttatcctttgaccaagcctggaactttgtttaactggggtccagatcaacagaaggcataccaagaaattaagcaggctttgcttactgctccagcacttggtttgcctgatcttacaaagccatttgagttgttcgttgatgaaaagcaaggatatgcaaagggtgtgcttacccagaagttgggaccttggagaaggcctgttgcttacctttctaagaaacttgatccagtggctgcaggttggccaccttgtcttagaatggttgctgcaattgcagtgcttacaaaggatgctggaaagttgactatgggacaacctcttgttattttggcaccacacgctgttgaggcacttgtgaagcagccacctgataggtggttgtcaaacgcaagaatgacccattatcaagctcttcttttggatactgatagggtgcagttcggtcctgttgtggctttgaatccagcaacacttttgccacttcctgaggaaggattgcaacacaactgccttgatattttggctgaggcacatggtacaagacctgatcttaccgatcagccattgcctgatgctgatcacacttggtacacagatggatcttcacttttgcaagaaggacagaggaaggctggtgctgcagttactacagagactgaagtgatttgggctaaggcacttccagctggaacatctgctcaaagagcagagcttattgctttgacccaggcacttaagatggctgaaggaaagaagttgaacgtttacactgattctaggtatgctttcgcaacagctcatattcacggagaaatctatagaaggagaggatggttgacatcagagggaaaggaaattaagaacaaggatgaaattcttgcacttttgaaggctctttttcttcctaagagattgtctattattcattgcccaggacaccaaaagggtcattcagcagaagctaggggaaatagaatggctgatcaggctgcaagaaaggctgcaattactgagacacctgatacctctactcttttgatcgaaaactcttcaccaaattcaaggcttattaac

SEQ ID NO: 405 - DNA, 2049 bp, Synthetic construct
  source 1..2049: mol_type = other DNA
acacttaatattgaggatgaacatagattgcacgagacctctaaggaacctgatgtttctcttggatcaacttggttgtcagatttcccacaagcatgggcagagaccggaggtatgggtcttgctgttaggcaggcaccacttattattcctttgaaggcaacctctactcctgtgtcaattaagcaatatccaatgtctcaggaagctaggcttggaattaagcctcacattcaaagacttttggatcagggtattttggtgccatgtcaatcaccttggaacacaccacttttgcctgttaagaagcctggaactaatgattacagaccagtgcaagatttgagggaggttaacaagagagtggaagatattcacccaactgttccaaacccttataatcttttgtctggattgccaccttcacatcaatggtacactgtgcttgatttgaaggatgcatttttctgccttaggttgcatccaacatctcagcctctttttgctttcgagtggagagatcctgaaatgggaatttctggtcaacttacatggaccaggttgcctcagggtttcaagaactcaccaaccttgtttaatgaggcacttcacagggatttggctgattttaggattcaacatcctgatcttatccttttgcagtatgttgatgatcttttgcttgctgcaacttctgaattggattgtcaacagggaactggtgcattgcttcaaacacttggaaatttgggttacagagcttcagcaaagaaggctcagatttgccaaaagcaggttaagtatcttggatacttgcttaaggaaggacaaaggtggttgaccgaggctagaaaggaaactgtgatgggtcaaccaacacctaagacccctaggcagcttagagagttcttgggaaaggcaggtttttgtaggcttttcattccaggatttgctgaaatggctgcaccactttatcctttgaccaagcctggaactttgtttaactggggtccagatcaacagaaggcataccaagaaattaagcaggctttgcttactgctccagcacttggtttgcctgatcttacaaagccatttgagttgttcgttgatgaaaagcaaggatatgcaaagggtgtgcttacccagaagttgggaccttggagaaggcctgttgcttacctttctaagaaacttgatccagtggctgcaggttggccaccttgtcttagaatggttgctgcaattgcagtgcttacaaaggatgctggaaagttgactatgggacaacctcttgttattttggcaccacacgctgttgaggcacttgtgaagcagccacctgataggtggttgtcaaacgcaagaatgacccattatcaagctcttcttttggatactgatagggtgcagttcggtcctgttgtggctttgaatccagcaacacttttgccacttcctgaggaaggattgcaacacaactgccttgatattttggctgaggcacatggtacaagacctgatcttaccgatcagccattgcctgatgctgatcacacttggtacacagatggatcttcacttttgcaagaaggacagaggaaggctggtgctgcagttactacagagactgaagtgatttgggctaaggcacttccagctggaacatctgctcaaagagcagagcttattgctttgacccaggcacttaagatggctgaaggaaagaagttgaacgtttacactgattctaggtatgctttcgcaacagctcatattcacggagaaatctatagaaggagaggatggttgacatcagagggaaaggaaattaagaacaaggatgaaattcttgcacttttgaaggctctttttcttcctaagagattgtctattattcattgcccaggacaccaaaagggtcattcagcagaagctaggggaaatagaatggctgatcaggctgcaagaaaggctgcaattactgagacacctgatacctctactcttttgatcgaaaactcttcaccaaattcaaggcttattaac

SEQ ID NO: 406 - DNA, 2049 bp, Synthetic construct
  source 1..2049: mol_type = other DNA
acacttaatattgaggatgaacatagattgcacgagacctctaaggaacctgatgtttctcttggatcaacttggttgtcagatttcccacaagcatgggcagagaccggaggtatgggtcttgctgttaggcaggcaccacttattattcctttgaaggcaacctctactcctgtgtcaattaagcaatatccaatgtctcaggaagctaggcttggaattaagcctcacattcaaagacttttggatcagggtattttggtgccatgtcaatcaccttggaacacaccacttttgcctgttaagaagcctggaactaatgattacagaccagtgcaagatttgagggaggttaacaagagagtggaagatattcacccaactgttccaaacccttataatcttttgtctggattgccaccttcacatcaatggtacactgtgcttgatttgaaggatgcatttttctgccttaggttgcatccaacatctcagcctctttttgctttcgagtggagagatcctgaaatgggaatttctggtcaacttacatggaccaggttgcctcagggtttcaagaactcaccaaccttgtttaatgaggcacttcacagggatttggctgattttaggattcaacatcctgatcttatccttttgcagtatgttgatgatcttttgcttgctgcaacttctgaattggattgtcaaagaggaactagggcattgcttcaaacacttggaaatttgggttacagagcttcagcaaagaaggctcagatttgccaaaagcaggttaagtatcttggatacttgcttaaggaaggacaaaggtggttgaccgaggctagaaaggaaactgtgatgggtcaaccaacacctaagacccctaggcagcttagagagttcttgggaaaggcaggtttttgtaggcttttcattccaggatttgctgaaatggctgcaccactttatcctttgaccaagcctggaactttgtttaactggggtccagatcaacagaaggcataccaagaaattaagcaggctttgcttactgctccagcacttggtttgcctgatcttacaaagccatttgagttgttcgttgatgaaaagcaaggatatgcaaagggtgtgcttacccagaagttgggaccttggagaaggcctgttgcttacctttctaagaaacttgatccagtggctgcaggttggccaccttgtcttagaatggttgctgcaattgcagtgcttacaaaggatgctggaaagttgactatgggacaacctcttgttattttggcaccacacgctgttgaggcacttgtgaagcagccacctgataggtggttgtcaaacgcaagaatgacccattatcaagctcttcttttggatactgatagggtgcagttcggtcctgttgtggctttgaatccagcaacacttttgccacttcctgaggaaggattgcaacacaactgccttgatattttggctgaggcacatggtacaagacctgatcttaccgatcagccattgcctgatgctgatcacacttggtacacagatggatcttcacttttgcaagaaggacagaggaaggctggtgctgcagttactacagagactgaagtgatttgggctaaggcacttccagctggaacatctgctcaaagagcagagcttattgctttgacccaggcacttaagatggctgaaggaaagaagttgaacgtttacactgattctaggtatgctttcgcaacagctcatattcacggagaaatctatagaaggagaggatggttgacatcagagggaaaggaaattaagaacaaggatgaaattcttgcacttttgaaggctctttttcttcctaagagattgtctattattcattgcccaggacaccaaaagggtcattcagcagaagctaggggaaatagaatggctgatcaggctgcaagaaaggctgcaattactgagacacctgatacctctactcttttgatcgaaaactcttcaccaaattcaaggcttattaac

SEQ ID NO: 407 - DNA, 2049 bp, Synthetic construct
  source 1..2049: mol_type = other DNA
acacttaatattgaggatgaacatagattgcacgagacctctaaggaacctgatgtttctcttggatcaacttggttgtcagatttcccacaagcatgggcagagaccggaggtatgggtcttgctgttaggcaggcaccacttattattcctttgaaggcaacctctactcctgtgtcaattaagcaatatccaatgtctcaggaagctaggcttggaattaagcctcacattcaaagacttttggatcagggtattttggtgccatgtcaatcaccttggaacacaccacttttgcctgttaagaagcctggaactaatgattacagaccagtgcaagatttgagggaggttaacaagagagtggaagatattcacccaactgttccaaacccttataatcttttgtctggattgccaccttcacatcaatggtacactgtgcttgatttgaaggatgcatttttctgccttaggttgcatccaacatctcagcctctttttgctttcgagtggagagatcctgaaatgggaatttctggtcaacttacatggaccaggttgcctcagggtttcaagaactcaccaaccttgtttaatgaggcacttcacagggatttggctgattttaggattcaacatcctgatcttatccttttgcagtatgttgatgatcttttgcttgctgcaacttctgaatttgattgtcaacagggaactagggcattgcttcaaacacttggaaatttgggttacagagcttcagcaaagaaggctcagatttgccaaaagcaggttaagtatcttggatacttgcttaaggaaggacaaaggtggttgaccgaggctagaaaggaaactgtgatgggtcaaccaacacctaagacccctaggcagcttagagagttcttgggaaaggcaggtttttgtaggcttttcattccaggatttgctgaaatggctgcaccactttatcctttgaccaagcctggaactttgtttaactggggtccagatcaacagaaggcataccaagaaattaagcaggctttgcttactgctccagcacttggtttgcctgatcttacaaagccatttgagttgttcgttgatgaaaagcaaggatatgcaaagggtgtgcttacccagaagttgggaccttggagaaggcctgttgcttacctttctaagaaacttgatccagtggctgcaggttggccaccttgtcttagaatggttgctgcaattgcagtgcttacaaaggatgctggaaagttgactatgggacaacctcttgttattttggcaccacacgctgttgaggcacttgtgaagcagccacctgataggtggttgtcaaacgcaagaatgacccattatcaagctcttcttttggatactgatagggtgcagttcggtcctgttgtggctttgaatccagcaacacttttgccacttcctgaggaaggattgcaacacaactgccttgatattttggctgaggcacatggtacaagacctgatcttaccgatcagccattgcctgatgctgatcacacttggtacacagatggatcttcacttttgcaagaaggacagaggaaggctggtgctgcagttactacagagactgaagtgatttgggctaaggcacttccagctggaacatctgctcaaagagcagagcttattgctttgacccaggcacttaagatggctgaaggaaagaagttgaacgtttacactgattctaggtatgctttcgcaacagctcatattcacggagaaatctatagaaggagaggatggttgacatcagagggaaaggaaattaagaacaaggatgaaattcttgcacttttgaaggctctttttcttcctaagagattgtctattattcattgcccaggacaccaaaagggtcattcagcagaagctaggggaaatagaatggctgatcaggctgcaagaaaggctgcaattactgagacacctgatacctctactcttttgatcgaaaactcttcaccaaattcaaggcttattaac

SEQ ID NO: 408 - DNA, 2049 bp, Synthetic construct
  source 1..2049: mol_type = other DNA
acacttaatattgaggatgaacatagattgcacgagacctctaaggaacctgatgtttctcttggatcaacttggttgtcagatttcccacaagcatgggcagagaccggaggtatgggtcttgctgttaggcaggcaccacttattattcctttgaaggcaacctctactcctgtgtcaattaagcaatatccaatgtctcaggaagctaggcttggaattaagcctcacattcaaagacttttggatcagggtattttggtgccatgtcaatcaccttggaacacaccacttttgcctgttaagaagcctggaactaatgattacagaccagtgcaagatttgagggaggttaacaagagagtggaagatattcacccaactgttccaaacccttataatcttttgtctggattgccaccttcacatcaatggtacactgtgcttgatttgaaggatgcatttttctgccttaggttgcatccaacatctcagcctctttttgctttcgagtggagagatcctgaaatgggaatttctggtcaacttacatggaccaggttgcctagaggtttcaagaactcaccaaccttgtttaatgaggcacttcacagggatttggctgattttaggattcaacatcctgatcttatccttttgcagtatgttgatgatcttttgcttgctgcaacttctgaattggattgtcaacagggaactagggcattgcttcaaacacttggaaatttgggttacagagcttcagcaaagaaggctcagatttgccaaaagcaggttaagtatcttggatacttgcttaaggaaggacaaaggtggttgaccgaggctagaaaggaaactgtgatgggtcaaccaacacctaagacccctaggcagcttagagagttcttgggaaaggcaggtttttgtaggcttttcattccaggatttgctgaaatggatgcaccactttatcctttgaccaagcctggaactttgtttaactggggtccagatcaacagaaggcataccaagaaattaagcaggctttgcttactgctccagcacttggtttgcctgatcttacaaagccatttgagttgttcgttgatgaaaagcaaggatatgcaaagggtgtgcttacccagaagttgggaccttggagaaggcctgttgcttacctttctaagaaacttgatccagtggctgcaggttggccaccttgtcttagaatggttgctgcaattgcagtgcttacaaaggatgctggaaagttgactatgggacaacctcttgttattttggcaccacacgctgttgaggcacttgtgaagcagccacctgataggtggttgtcaaacgcaagaatgacccattatcaagctcttcttttggatactgatagggtgcagttcggtcctgttgtggctttgaatccagcaacacttttgccacttcctgaggaaggattgcaacacaactgccttgatattttggctgaggcacatggtacaagacctgatcttaccgatcagccattgcctgatgctgatcacacttggtacacagatggatcttcacttttgcaagaaggacagaggaaggctggtgctgcagttactacagagactgaagtgatttgggctaaggcacttccagctggaacatctgctcaaagagcagagcttattgctttgacccaggcacttaagatggctgaaggaaagaagttgaacgtttacactgattctaggtatgctttcgcaacagctcatattcacggagaaatctatagaaggagaggatggttgacatcagagggaaaggaaattaagaacaaggatgaaattcttgcacttttgaaggctctttttcttcctaagagattgtctattattcattgcccaggacaccaaaagggtcattcagcagaagctaggggaaatagaatggctgatcaggctgcaagaaaggctgcaattactgagacacctgatacctctactcttttgatcgaaaactcttcaccaaattcaaggcttattaac

SEQ ID NO: 409 - DNA, 2049 bp, Synthetic construct
  source 1..2049: mol_type = other DNA
acacttaatattgaggatgaacatagattgcacgagacctctaaggaacctgatgtttctcttggatcaacttggttgtcagatttcccacaagcatgggcagagaccggaggtatgggtcttgctgttaggcaggcaccacttattattcctttgaaggcaacctctactcctgtgtcaattaagcaatatccaatgtctcaggaagctaggcttggaattaagcctcacattcaaagacttttggatcagggtattttggtgccatgtcaatcaccttggaacacaccacttttgcctgttaagaagcctggaactaatgattacagaccagtgcaagatttgagggaggttaacaagagagtggaagatattcacccaactgttccaaacccttataatcttttgtctggattgccaccttcacatcaatggtacactgtgcttgatttgaaggatgcatttttctgccttaggttgcatccaacatctcagcctctttttgctttcgagtggagagatcctgaaatgggaatttctggtcaacttacatggaccaggttgcctcagggtttcaagaactcaccaaccttgtttaatgaggcacttcacagggatttggctgattttaggattcaacatcctgatcttatccttttgcagtatgttgatggacttttgcttgctgcaacttctgaattggattgtcatcagggaactagggcattgcttcaaacacttggaaatttgggttacagagcttcagcaaagaaggctcagatttgccaaaagcaggttaagtatcttggatacttgcttaaggaaggacaaaggtggttgaccgaggctagaaaggaaactgtgatgggtcaaccaacacctaagacccctaggcagcttagagagttcttgggaaaggcaggtttttgtaggcttttcattccaggatttgctgaaatggctgcaccactttatcctttgaccaagcctggaactttgtttaactggggtccagatcaacagaaggcataccaagaaattaagcaggctttgcttactgctccagcacttggtttgcctgatcttacaaagccatttgagttgttcgttgatgaaaagcaaggatatgcaaagggtgtgcttacccagaagttgggaccttggagaaggcctgttgcttacctttctaagaaacttgatccagtggctgcaggttggccaccttgtcttagaatggttgctgcaattgcagtgcttacaaaggatgctggaaagttgactatgggacaacctcttgttattttggcaccacacgctgttgaggcacttgtgaagcagccacctgataggtggttgtcaaacgcaagaatgacccattatcaagctcttcttttggatactgatagggtgcagttcggtcctgttgtggctttgaatccagcaacacttttgccacttcctgaggaaggattgcaacacaactgccttgatattttggctgaggcacatggtacaagacctgatcttaccgatcagccattgcctgatgctgatcacacttggtacacagatggatcttcacttttgcaagaaggacagaggaaggctggtgctgcagttactacagagactgaagtgatttgggctaaggcacttccagctggaacatctgctcaaagagcagagcttattgctttgacccaggcacttaagatggctgaaggaaagaagttgaacgtttacactgattctaggtatgctttcgcaacagctcatattcacggagaaatctatagaaggagaggatggttgacatcagagggaaaggaaattaagaacaaggatgaaattcttgcacttttgaaggctctttttcttcctaagagattgtctattattcattgcccaggacaccaaaagggtcattcagcagaagctaggggaaatagaatggctgatcaggctgcaagaaaggctgcaattactgagacacctgatacctctactcttttgatcgaaaactcttcaccaaattcaaggcttattaac

SEQ ID NO: 410 - protein, 1315 aa, Synthetic construct
SKLEKFTNCYSLSKTLRFKAIPVGKTQENIDNKRLLVEDEKRAEDYKGVKKLLDRYYLSFINDVLHSIKLKNLNNYISLFRKKTRTEKENKELENLEINLRKEIAKAFKGNEGYKSLFKKDIIETILPEFLDDKDEIALVNSFNGFTTAFTGFFDNRENMFSEEAKSTSIAFRCINENLTRYISNMDIFEKVDAIFDKHEVQEIKEKILNSDYDVEDFFEGEFFNFVLTQEGIDVYNAIIGGFVTESGEKIKGLNEYINLYNQKTKQKLPKFKPLYKQVLSDRESLSFYGEGSSGIDGVKLSSTEKKKMDEIAPPKGSVFTCPICEKRSIVGVTANLVHDHNHDTGWGREWICDSCNTGLGRFKDNPKFLEKVIEYLKKGYTSDEEVLEVFRNTLNKNSEIFSSIKKLEKLFKNFDEYSSAGIFVKNGPAISTISKDIFGEWNVIRDKWNAEYDDIHLKKKAVVTEKYEDDRRKSFKKIGSFSLEQLQEYADADLSVVEKLKEIIIQKVDEIYKVYGSSEKLFDADFVLEKSLKKNDAVVAIMKDLLDSVKSFENYIKAFFGEGKETNRDESFYGDFVLAYDILLKVDHIYDAIRNYVTQKPYSKDKFKLYFQNPQFMGGWDKDKETDYRATILRYGSKYYLAIMDKKYAKCLQKIDKDDVNGNYEKINYKLLPGPNKMLPKVFFSKKWMAYYNPSEDIQKIYKNGTFKKGDMFNLNDCHKLIDFFKDSISRYPKWSNAYDFNFSETEKYKDIAGFYREVEEQGYKVSFESASKKEVDKLVEEGKLYMFQIYNKDFSDKSHGTPNLHTMYFKLLFDENNHGQIRLSGGAELFMRRASLKKEELVVHPANSPIANKNPDNPKKTTTLSYDVYKDKRFSEDQYELHIPIAINKCPKNIFKINTEVRVLLKHDDNPYVIGIARGERNLLYIVVVDGKGNIVEQYSLNEIINNFNGIRIKTDYHSLLDKKEKERFEARQNWTSIENIKELKAGYISQVVHKICELVEKYDAVIALEDLNSGFKNSRVKVEKQVYQKFEKMLIDKLNYMVDKKSNPCATGGALKGYQITNKFESFKSMSTQNGFIFYIPAWLTSKIDPSTGFVNLLKTKYTSIADSKKFISSFDRIMYVPEEDLFEFALDYKNFSRTDADYIKKWKLYSYGNRIRIFRNPKKNNVFDWEEVCLTSAYKELFNKYGINYQQGDIRALLCEQSDKAFYSSFMALMSLMLQMRNSITGRTDVDFLISPVKNSDGIFYDSRNYEAQENAILPKNADANGAYNIARKVLWAIGQFKKAEDEKLDKVKIAISNKEWLEYAQTSVKH

SEQ ID NO: 411 - protein, 1501 aa, Synthetic construct
SKLEKFTNCYSLSKTLRFKAIPVGKTQENIDNKRLLVEDEKRAEDYKGVKKLLDRYYLSFINDVLHSIKLKNLNNYISLFRKKTRTEKENKELENLEINLRKEIAKAFKGNEGYKSLFKKDIIETILPEFLDDKDEIALVNSFNGFTTAFTGFFDNRENMFSEEAKSTSIAFRCINENLTRYISNMDIFEKVDAIFDKHEVQEIKEKILNSDYDVEDFFEGEFFNFVLTQEGIDVYNAIIGGFVTESGEKIKGLNEYINLYNQKTKQKLPKFKPLYKQVLSDRESLSFYGEGSSGAAPNIHGWGKEGHEIICKIAQTRLDETAAKAVKELLPESAEGDLSSLCLWADRVKFRYHWSSPLHYINTPDACSYQYNRDCKDESGEKGRCVAGAIYNYTTQLLSYKTAASSQSQYNLTEALLFVSHFMGDIHQPLHVSYASDKGGNTIEVHWYTRKANLHHIWDSNIIETAEADLYNSALEGMVDALKKNITTEWADQVKRWETCTKKTACPDIYASEGIQAACDWAYKGVTEGDTLEDEYFYSRLPIVYQRLAQGGVRLAATLNRIFGGYTSDEEVLEVFRNTLNKNSEIFSSIKKLEKLFKNFDEYSSAGIFVKNGPAISTISKDIFGEWNVIRDKWNAEYDDIHLKKKAVVTEKYEDDRRKSFKKIGSFSLEQLQEYADADLSVVEKLKEIIIQKVDEIYKVYGSSEKLFDADFVLEKSLKKNDAVVAIMKDLLDSVKSFENYIKAFFGEGKETNRDESFYGDFVLAYDILLKVDHIYDAIRNYVTQKPYSKDKFKLYFQNPQFMGGWDKDKETDYRATILRYGSKYYLAIMDKKYAKCLQKIDKDDVNGNYEKINYKLLPGPNKMLPKVFFSKKWMAYYNPSEDIQKIYKNGTFKKGDMFNLNDCHKLIDFFKDSISRYPKWSNAYDFNFSETEKYKDIAGFYREVEEQGYKVSFESASKKEVDKLVEEGKLYMFQIYNKDFSDKSHGTPNLHTMYFKLLFDENNHGQIRLSGGAELFMRRASLKKEELVVHPANSPIANKNPDNPKKTTTLSYDVYKDKRFSEDQYELHIPIAINKCPKNIFKINTEVRVLLKHDDNPYVIGIARGERNLLYIVVVDGKGNIVEQYSLNEIINNFNGIRIKTDYHSLLDKKEKERFEARQNWTSIENIKELKAGYISQVVHKICELVEKYDAVIALEDLNSGFKNSRVKVEKQVYQKFEKMLIDKLNYMVDKKSNPCATGGALKGYQITNKFESFKSMSTQNGFIFYIPAWLTSKIDPSTGFVNLLKTKYTSIADSKKFISSFDRIMYVPEEDLFEFALDYKNFSRTDADYIKKWKLYSYGNRIRIFRNPKKNNVFDWEEVCLTSAYKELFNKYGINYQQGDIRALLCEQSDKAFYSSFMALMSLMLQMRNSITGRTDVDFLISPVKNSDGIFYDSRNYEAQENAILPKNADANGAYNIARKVLWAIGQFKKAEDEKLDKVKIAISNKEWLEYAQTSVKH

SEQ ID NO: 412 - protein, 1454 aa, Synthetic construct
SKLEKFTNCYSLSKTLRFKAIPVGKTQENIDNKRLLVEDEKRAEDYKGVKKLLDRYYLSFINDVLHSIKLKNLNNYISLFRKKTRTEKENKELENLEINLRKEIAKAFKGNEGYKSLFKKDIIETILPEFLDDKDEIALVNSFNGFTTAFTGFFDNRENMFSEEAKSTSIAFRCINENLTRYISNMDIFEKVDAIFDKHEVQEIKEKILNSDYDVEDFFEGEFFNFVLTQEGIDVYNAIIGGFVTESGEKIKGLNEYINLYNQKTKQKLPKFKPLYKQVLSDRESLSFYGEGSSGARVRTYPNVSHANTHYKNTVSSKLLPFTANYQLQLGELDNLNRATFSHIQLQDRHETKDVRTKINYDPVGWHNYQFPYGDGSKSSWVMNRGHLVGYQFCGLNDEPRNLVAMTAWLNTGAYSGANDSNPEGMLYYENRLDSWLALHPDFWLDYKVTPIYSGNEVVPRQIELQYVGIDSSGELLTIRLNSNKESIDENGVTTVILENSAPNINLDYLNGTATPKNGYTSDEEVLEVFRNTLNKNSEIFSSIKKLEKLFKNFDEYSSAGIFVKNGPAISTISKDIFGEWNVIRDKWNAEYDDIHLKKKAVVTEKYEDDRRKSFKKIGSFSLEQLQEYADADLSVVEKLKEIIIQKVDEIYKVYGSSEKLFDADFVLEKSLKKNDAVVAIMKDLLDSVKSFENYIKAFFGEGKETNRDESFYGDFVLAYDILLKVDHIYDAIRNYVTQKPYSKDKFKLYFQNPQFMGGWDKDKETDYRATILRYGSKYYLAIMDKKYAKCLQKIDKDDVNGNYEKINYKLLPGPNKMLPKVFFSKKWMAYYNPSEDIQKIYKNGTFKKGDMFNLNDCHKLIDFFKDSISRYPKWSNAYDFNFSETEKYKDIAGFYREVEEQGYKVSFESASKKEVDKLVEEGKLYMFQIYNKDFSDKSHGTPNLHTMYFKLLFDENNHGQIRLSGGAELFMRRASLKKEELVVHPANSPIANKNPDNPKKTTTLSYDVYKDKRFSEDQYELHIPIAINKCPKNIFKINTEVRVLLKHDDNPYVIGIARGERNLLYIVVVDGKGNIVEQYSLNEIINNFNGIRIKTDYHSLLDKKEKERFEARQNWTSIENIKELKAGYISQVVHKICELVEKYDAVIALEDLNSGFKNSRVKVEKQVYQKFEKMLIDKLNYMVDKKSNPCATGGALKGYQITNKFESFKSMSTQNGFIFYIPAWLTSKIDPSTGFVNLLKTKYTSIADSKKFISSFDRIMYVPEEDLFEFALDYKNFSRTDADYIKKWKLYSYGNRIRIFRNPKKNNVFDWEEVCLTSAYKELFNKYGINYQQGDIRALLCEQSDKAFYSSFMALMSLMLQMRNSITGRTDVDFLISPVKNSDGIFYDSRNYEAQENAILPKNADANGAYNIARKVLWAIGQFKKAEDEKLDKVKIAISNKEWLEYAQTSVKH

SEQ ID NO: 413 - protein, 1375 aa, Synthetic construct
SKLEKFTNCYSLSKTLRFKAIPVGKTQENIDNKRLLVEDEKRAEDYKGVKKLLDRYYLSFINDVLHSIKLKNLNNYISLFRKKTRTEKENKELENLEINLRKEIAKAFKGNEGYKSLFKKDIIETILPEFLDDKDEIALVNSFNGFTTAFTGFFDNRENMFSEEAKSTSIAFRCINENLTRYISNMDIFEKVDAIFDKHEVQEIKEKILNSDYDVEDFFEGEFFNFVLTQEGIDVYNAIIGGFVTESGEKIKGLNEYINLYNQKTKQKLPKFKPLYKQVLSDRESLSFYGEGSSGENQTTGKGKNNSRPRYKSLEKAIKEFGSQILKEHPTDNQELRNNRLYLYYLQNGKDMYTGQDLDIHNLSNYDIDHIVPQSFITDNSIDNLVLTSSAGNREKGDDVPPLEIVRKRKVFWEKLYQGNLMSKRKFDYLTKAERGGLTGYTSDEEVLEVFRNTLNKNSEIFSSIKKLEKLFKNFDEYSSAGIFVKNGPAISTISKDIFGEWNVIRDKWNAEYDDIHLKKKAVVTEKYEDDRRKSFKKIGSFSLEQLQEYADADLSVVEKLKEIIIQKVDEIYKVYGSSEKLFDADFVLEKSLKKNDAVVAIMKDLLDSVKSFENYIKAFFGEGKETNRDESFYGDFVLAYDILLKVDHIYDAIRNYVTQKPYSKDKFKLYFQNPQFMGGWDKDKETDYRATILRYGSKYYLAIMDKKYAKCLQKIDKDDVNGNYEKINYKLLPGPNKMLPKVFFSKKWMAYYNPSEDIQKIYKNGTFKKGDMFNLNDCHKLIDFFKDSISRYPKWSNAYDFNFSETEKYKDIAGFYREVEEQGYKVSFESASKKEVDKLVEEGKLYMFQIYNKDFSDKSHGTPNLHTMYFKLLFDENNHGQIRLSGGAELFMRRASLKKEELVVHPANSPIANKNPDNPKKTTTLSYDVYKDKRFSEDQYELHIPIAINKCPKNIFKINTEVRVLLKHDDNPYVIGIARGERNLLYIVVVDGKGNIVEQYSLNEIINNFNGIRIKTDYHSLLDKKEKERFEARQNWTSIENIKELKAGYISQVVHKICELVEKYDAVIALEDLNSGFKNSRVKVEKQVYQKFEKMLIDKLNYMVDKKSNPCATGGALKGYQITNKFESFKSMSTQNGFIFYIPAWLTSKIDPSTGFVNLLKTKYTSIADSKKFISSFDRIMYVPEEDLFEFALDYKNFSRTDADYIKKWKLYSYGNRIRIFRNPKKNNVFDWEEVCLTSAYKELFNKYGINYQQGDIRALLCEQSDKAFYSSFMALMSLMLQMRNSITGRTDVDFLISPVKNSDGIFYDSRNYEAQENAILPKNADANGAYNIARKVLWAIGQFKKAEDEKLDKVKIAISNKEWLEYAQTSVKH

SEQ ID NO: 414 - protein, 1375 aa, Synthetic construct
SKLEKFTNCYSLSKTLRFKAIPVGKTQENIDNKRLLVEDEKRAEDYKGVKKLLDRYYLSFINDVLHSIKLKNLNNYISLFRKKTRTEKENKELENLEINLRKEIAKAFKGNEGYKSLFKKDIIETILPEFLDDKDEIALVNSFNGFTTAFTGFFDNRENMFSEEAKSTSIAFRCINENLTRYISNMDIFEKVDAIFDKHEVQEIKEKILNSDYDVEDFFEGEFFNFVLTQEGIDVYNAIIGGFVTESGEKIKGLNEYINLYNQKTKQKLPKFKPLYKQVLSDRESLSFYGEGSSGENQFTNQGRRNSQQRLKGLTDSIKEFGSQILKEHPVENSQLQNDRLFLYYLQNGRDMYTGEELDIDYLSQYDIDHIIPQAFIKDNSIDNRVLTSSKENRGKSDDVPSKDVVRKMKSYWSKLLSAKLITQRKFDNLTKAERGGLTGYTSDEEVLEVFRNTLNKNSEIFSSIKKLEKLFKNFDEYSSAGIFVKNGPAISTISKDIFGEWNVIRDKWNAEYDDIHLKKKAVVTEKYEDDRRKSFKKIGSFSLEQLQEYADADLSVVEKLKEIIIQKVDEIYKVYGSSEKLFDADFVLEKSLKKNDAVVAIMKDLLDSVKSFENYIKAFFGEGKETNRDESFYGDFVLAYDILLKVDHIYDAIRNYVTQKPYSKDKFKLYFQNPQFMGGWDKDKETDYRATILRYGSKYYLAIMDKKYAKCLQKIDKDDVNGNYEKINYKLLPGPNKMLPKVFFSKKWMAYYNPSEDIQKIYKNGTFKKGDMFNLNDCHKLIDFFKDSISRYPKWSNAYDFNFSETEKYKDIAGFYREVEEQGYKVSFESASKKEVDKLVEEGKLYMFQIYNKDFSDKSHGTPNLHTMYFKLLFDENNHGQIRLSGGAELFMRRASLKKEELVVHPANSPIANKNPDNPKKTTTLSYDVYKDKRFSEDQYELHIPIAINKCPKNIFKINTEVRVLLKHDDNPYVIGIARGERNLLYIVVVDGKGNIVEQYSLNEIINNFNGIRIKTDYHSLLDKKEKERFEARQNWTSIENIKELKAGYISQVVHKICELVEKYDAVIALEDLNSGFKNSRVKVEKQVYQKFEKMLIDKLNYMVDKKSNPCATGGALKGYQITNKFESFKSMSTQNGFIFYIPAWLTSKIDPSTGFVNLLKTKYTSIADSKKFISSFDRIMYVPEEDLFEFALDYKNFSRTDADYIKKWKLYSYGNRIRIFRNPKKNNVFDWEEVCLTSAYKELFNKYGINYQQGDIRALLCEQSDKAFYSSFMALMSLMLQMRNSITGRTDVDFLISPVKNSDGIFYDSRNYEAQENAILPKNADANGAYNIARKVLWAIGQFKKAEDEKLDKVKIAISNKEWLEYAQTSVKH

SEQ ID NO: 415 - protein, 1398 aa, Synthetic construct
SKLEKFTNCYSLSKTLRFKAIPVGKTQENIDNKRLLVEDEKRAEDYKGVKKLLDRYYLSFINDVLHSIKLKNLNNYISLFRKKTRTEKENKELENLEINLRKEIAKAFKGNEGYKSLFKKDIIETILPEFLDDKDEIALVNSFNGFTTAFTGFFDNRENMFSEEAKSTSIAFRCINENLTRYISNMDIFEKVDAIFDKHEVQEIKEKILNSDYDVEDFFEGEFFNFVLTQEGIDVYNAIIGGFVTESGEKIKGLNEYINLYNQKTKQKLPKFKPLYKQVLSDRESLSFYGEGSSGVREGFVTEKRAREMDGDMRRRAARNAKLFQEMQEKLNVQGKPSRADLWRYQSVQRQNCQCAYCGSPITFSNSEMDHIVPRAGQGSTNTRENLVAVCHRCNQSKGNTPFAIWAKNTSIEGVSVKEAVERTRHWVTDTGMRSTDFKKFTKAVVERFQRATMDEEIDARSGYTSDEEVLEVFRNTLNKNSEIFSSIKKLEKLFKNFDEYSSAGIFVKNGPAISTISKDIFGEWNVIRDKWNAEYDDIHLKKKAVVTEKYEDDRRKSFKKIGSFSLEQLQEYADADLSVVEKLKEIIIQKVDEIYKVYGSSEKLFDADFVLEKSLKKNDAVVAIMKDLLDSVKSFENYIKAFFGEGKETNRDESFYGDFVLAYDILLKVDHIYDAIRNYVTQKPYSKDKFKLYFQNPQFMGGWDKDKETDYRATILRYGSKYYLAIMDKKYAKCLQKIDKDDVNGNYEKINYKLLPGPNKMLPKVFFSKKWMAYYNPSEDIQKIYKNGTFKKGDMFNLNDCHKLIDFFKDSISRYPKWSNAYDFNFSETEKYKDIAGFYREVEEQGYKVSFESASKKEVDKLVEEGKLYMFQIYNKDFSDKSHGTPNLHTMYFKLLFDENNHGQIRLSGGAELFMRRASLKKEELVVHPANSPIANKNPDNPKKTTTLSYDVYKDKRFSEDQYELHIPIAINKCPKNIFKINTEVRVLLKHDDNPYVIGIARGERNLLYIVVVDGKGNIVEQYSLNEIINNFNGIRIKTDYHSLLDKKEKERFEARQNWTSIENIKELKAGYISQVVHKICELVEKYDAVIALEDLNSGFKNSRVKVEKQVYQKFEKMLIDKLNYMVDKKSNPCATGGALKGYQITNKFESFKSMSTQNGFIFYIPAWLTSKIDPSTGFVNLLKTKYTSIADSKKFISSFDRIMYVPEEDLFEFALDYKNFSRTDADYIKKWKLYSYGNRIRIFRNPKKNNVFDWEEVCLTSAYKELFNKYGINYQQGDIRALLCEQSDKAFYSSFMALMSLMLQMRNSITGRTDVDFLISPVKNSDGIFYDSRNYEAQENAILPKNADANGAYNIARKVLWAIGQFKKAEDEKLDKVKIAISNKEWLEYAQTSVKH

SEQ ID NO: 416 - protein, 1491 aa, Synthetic construct
SKLEKFTNCYSLSKTLRFKAIPVGKTQENIDNKRLLVEDEKRAEDYKGVKKLLDRYYLSFINDVLHSIKLKNLNNYISLFRKKTRTEKENKELENLEINLRKEIAKAFKGNEGYKSLFKKDIIETILPEFLDDKDEIALVNSFNGFTTAFTGFFDNRENMFSEEAKSTSIAFRCINENLTRYISNMDIFEKVDAIFDKHEVQEIKEKILNSDYDVEDFFEGEFFNFVLTQEGIDVYNAIIGGFVTESGEKIKGLNEYINLYNQKTKQKLPKFKPLYKQVLSDRESLSFYGEGSSGGKAQLDIKNFPELYRTTERVYKKSGQSTKPVTVSNIHYSVLDGYGRSGEAYGIITKDMIDMSAGYREKWESKPEPSGWYSYFFKNTNQRATESDYKHSPKNVSKISNNIKASILLSNGNVRNGYLFDRSHLIADSLGGRPFRNNLITGTRTQNVGNNDRKGGMQYIENKVLDHIKRNPKVHVYYKATPVYQGSELLPRAVLVSALSSDGFIDETVRVFNNVAGFNIDYQNGGLLSSTADVDINNVEENEIETTDDEIEEGGYTSDEEVLEVFRNTLNKNSEIFSSIKKLEKLFKNFDEYSSAGIFVKNGPAISTISKDIFGEWNVIRDKWNAEYDDIHLKKKAVVTEKYEDDRRKSFKKIGSFSLEQLQEYADADLSVVEKLKEIIIQKVDEIYKVYGSSEKLFDADFVLEKSLKKNDAVVAIMKDLLDSVKSFENYIKAFFGEGKETNRDESFYGDFVLAYDILLKVDHIYDAIRNYVTQKPYSKDKFKLYFQNPQFMGGWDKDKETDYRATILRYGSKYYLAIMDKKYAKCLQKIDKDDVNGNYEKINYKLLPGPNKMLPKVFFSKKWMAYYNPSEDIQKIYKNGTFKKGDMFNLNDCHKLIDFFKDSISRYPKWSNAYDFNFSETEKYKDIAGFYREVEEQGYKVSFESASKKEVDKLVEEGKLYMFQIYNKDFSDKSHGTPNLHTMYFKLLFDENNHGQIRLSGGAELFMRRASLKKEELVVHPANSPIANKNPDNPKKTTTLSYDVYKDKRFSEDQYELHIPIAINKCPKNIFKINTEVRVLLKHDDNPYVIGIARGERNLLYIVVVDGKGNIVEQYSLNEIINNFNGIRIKTDYHSLLDKKEKERFEARQNWTSIENIKELKAGYISQVVHKICELVEKYDAVIALEDLNSGFKNSRVKVEKQVYQKFEKMLIDKLNYMVDKKSNPCATGGALKGYQITNKFESFKSMSTQNGFIFYIPAWLTSKIDPSTGFVNLLKTKYTSIADSKKFISSFDRIMYVPEEDLFEFALDYKNFSRTDADYIKKWKLYSYGNRIRIFRNPKKNNVFDWEEVCLTSAYKELFNKYGINYQQGDIRALLCEQSDKAFYSSFMALMSLMLQMRNSITGRTDVDFLISPVKNSDGIFYDSRNYEAQENAILPKNADANGAYNIARKVLWAIGQFKKAEDEKLDKVKIAISNKEWLEYAQTSVKH

SEQ ID NO: 417 - protein, 1351 aa, Synthetic construct
SKLEKFTNCYSLSKTLRFKAIPVGKTQENIDNKRLLVEDEKRAEDYKGVKKLLDRYYLSFINDVLHSIKLKNLNNYISLFRKKTRTEKENKELENLEINLRKEIAKAFKGNEGYKSLFKKDIIETILPEFLDDKDEIALVNSFNGFTTAFTGFFDNRENMFSEEAKSTSIAFRCINENLTRYISNMDIFEKVDAIFDKHEVQEIKEKILNSDYDVEDFFEGEFFNFVLTQEGIDVYNAIIGGFVTESGEKIKGLNEYINLYNQKTKQKLPKFKPLYKQVLSDRESLSFYGEGSSGSNNSYLRAKVFETEHGVCQLCNVNAQELFLRLRDAPKSQRKNLLYATWTSKLPLEQLNEMIRNPGEGHFWQVDHIKPVYGGGGQCSLDNLQTLCTVCHKERTARQAKERSQVRRQSLASKGYTSDEEVLEVFRNTLNKNSEIFSSIKKLEKLFKNFDEYSSAGIFVKNGPAISTISKDIFGEWNVIRDKWNAEYDDIHLKKKAVVTEKYEDDRRKSFKKIGSFSLEQLQEYADADLSVVEKLKEIIIQKVDEIYKVYGSSEKLFDADFVLEKSLKKNDAVVAIMKDLLDSVKSFENYIKAFFGEGKETNRDESFYGDFVLAYDILLKVDHIYDAIRNYVTQKPYSKDKFKLYFQNPQFMGGWDKDKETDYRATILRYGSKYYLAIMDKKYAKCLQKIDKDDVNGNYEKINYKLLPGPNKMLPKVFFSKKWMAYYNPSEDIQKIYKNGTFKKGDMFNLNDCHKLIDFFKDSISRYPKWSNAYDFNFSETEKYKDIAGFYREVEEQGYKVSFESASKKEVDKLVEEGKLYMFQIYNKDFSDKSHGTPNLHTMYFKLLFDENNHGQIRLSGGAELFMRRASLKKEELVVHPANSPIANKNPDNPKKTTTLSYDVYKDKRFSEDQYELHIPIAINKCPKNIFKINTEVRVLLKHDDNPYVIGIARGERNLLYIVVVDGKGNIVEQYSLNEIINNFNGIRIKTDYHSLLDKKEKERFEARQNWTSIENIKELKAGYISQVVHKICELVEKYDAVIALEDLNSGFKNSRVKVEKQVYQKFEKMLIDKLNYMVDKKSNPCATGGALKGYQITNKFESFKSMSTQNGFIFYIPAWLTSKIDPSTGFVNLLKTKYTSIADSKKFISSFDRIMYVPEEDLFEFALDYKNFSRTDADYIKKWKLYSYGNRIRIFRNPKKNNVFDWEEVCLTSAYKELFNKYGINYQQGDIRALLCEQSDKAFYSSFMALMSLMLQMRNSITGRTDVDFLISPVKNSDGIFYDSRNYEAQENAILPKNADANGAYNIARKVLWAIGQFKKAEDEKLDKVKIAISNKEWLEYAQTSVKH

SEQ ID NO: 418 - protein, 1367 aa, Synthetic construct
SKLEKFTNCYSLSKTLRFKAIPVGKTQENIDNKRLLVEDEKRAEDYKGVKKLLDRYYLSFINDVLHSIKLKNLNNYISLFRKKTRTEKENKELENLEINLRKEIAKAFKGNEGYKSLFKKDIIETILPEFLDDKDEIALVNSFNGFTTAFTGFFDNRENMFSEEAKSTSIAFRCINENLTRYISNMDIFEKVDAIFDKHEVQEIKEKILNSDYDVEDFFEGEFFNFVLTQEGIDVYNAIIGGFVTESGEKIKGLNEYINLYNQKTKQKLPKFKPLYKQVLSDRESLSFYGEGSSGDEPGVATGNGQPVTGNWLAGASQGDGVPIPSQIADQLRGKEFKSWRDFREQFWMAVSKDPSALENLSPSNRYFVSQGLAPYAVPEEHLGSKEKFEIHHVVPLESGGALYNIDNLVIVTPKRHSEIHKELKLKRKEKGYTSDEEVLEVFRNTLNKNSEIFSSIKKLEKLFKNFDEYSSAGIFVKNGPAISTISKDIFGEWNVIRDKWNAEYDDIHLKKKAVVTEKYEDDRRKSFKKIGSFSLEQLQEYADADLSVVEKLKEIIIQKVDEIYKVYGSSEKLFDADFVLEKSLKKNDAVVAIMKDLLDSVKSFENYIKAFFGEGKETNRDESFYGDFVLAYDILLKVDHIYDAIRNYVTQKPYSKDKFKLYFQNPQFMGGWDKDKETDYRATILRYGSKYYLAIMDKKYAKCLQKIDKDDVNGNYEKINYKLLPGPNKMLPKVFFSKKWMAYYNPSEDIQKIYKNGTFKKGDMFNLNDCHKLIDFFKDSISRYPKWSNAYDFNFSETEKYKDIAGFYREVEEQGYKVSFESASKKEVDKLVEEGKLYMFQIYNKDFSDKSHGTPNLHTMYFKLLFDENNHGQIRLSGGAELFMRRASLKKEELVVHPANSPIANKNPDNPKKTTTLSYDVYKDKRFSEDQYELHIPIAINKCPKNIFKINTEVRVLLKHDDNPYVIGIARGERNLLYIVVVDGKGNIVEQYSLNEIINNFNGIRIKTDYHSLLDKKEKERFEARQNWTSIENIKELKAGYISQVVHKICELVEKYDAVIALEDLNSGFKNSRVKVEKQVYQKFEKMLIDKLNYMVDKKSNPCATGGALKGYQITNKFESFKSMSTQNGFIFYIPAWLTSKIDPSTGFVNLLKTKYTSIADSKKFISSFDRIMYVPEEDLFEFALDYKNFSRTDADYIKKWKLYSYGNRIRIFRNPKKNNVFDWEEVCLTSAYKELFNKYGINYQQGDIRALLCEQSDKAFYSSFMALMSLMLQMRNSITGRTDVDFLISPVKNSDGIFYDSRNYEAQENAILPKNADANGAYNIARKVLWAIGQFKKAEDEKLDKVKIAISNKEWLEYAQTSVKH

SEQ ID NO: 419 - protein, 1299 aa, Synthetic construct
SKLEKFTNCYSLSKTLRFKAIPVGKTQENIDNKRLLVEDEKRAEDYKGVKKLLDRYYLSFINDVLHSIKLKNLNNYISLFRKKTRTEKENKELENLEINLRKEIAKAFKGNEGYKSLFKKDIIETILPEFLDDKDEIALVNSFNGFTTAFTGFFDNRENMFSEEAKSTSIAFRCINENLTRYISNMDIFEKVDAIFDKHEVQEIKEKILNSDYDVEDFFEGEFFNFVLTQEGIDVYNAIIGGFVTESGEKIKGLNEYINLYNQKTKQKLPKFKPLYKQVLSDRESLSFYGEGSSGRLREQALMRDKGLCLHCKNNRKIKVADMVDHIIPIKVDPSLKLKLENLQSLCNPCHNRKTAEDKKKYGGYTSDEEVLEVFRNTLNKNSEIFSSIKKLEKLFKNFDEYSSAGIFVKNGPAISTISKDIFGEWNVIRDKWNAEYDDIHLKKKAVVTEKYEDDRRKSFKKIGSFSLEQLQEYADADLSVVEKLKEIIIQKVDEIYKVYGSSEKLFDADFVLEKSLKKNDAVVAIMKDLLDSVKSFENYIKAFFGEGKETNRDESFYGDFVLAYDILLKVDHIYDAIRNYVTQKPYSKDKFKLYFQNPQFMGGWDKDKETDYRATILRYGSKYYLAIMDKKYAKCLQKIDKDDVNGNYEKINYKLLPGPNKMLPKVFFSKKWMAYYNPSEDIQKIYKNGTFKKGDMFNLNDCHKLIDFFKDSISRYPKWSNAYDFNFSETEKYKDIAGFYREVEEQGYKVSFESASKKEVDKLVEEGKLYMFQIYNKDFSDKSHGTPNLHTMYFKLLFDENNHGQIRLSGGAELFMRRASLKKEELVVHPANSPIANKNPDNPKKTTTLSYDVYKDKRFSEDQYELHIPIAINKCPKNIFKINTEVRVLLKHDDNPYVIGIARGERNLLYIVVVDGKGNIVEQYSLNEIINNFNGIRIKTDYHSLLDKKEKERFEARQNWTSIENIKELKAGYISQVVHKICELVEKYDAVIALEDLNSGFKNSRVKVEKQVYQKFEKMLIDKLNYMVDKKSNPCATGGALKGYQITNKFESFKSMSTQNGFIFYIPAWLTSKIDPSTGFVNLLKTKYTSIADSKKFISSFDRIMYVPEEDLFEFALDYKNFSRTDADYIKKWKLYSYGNRIRIFRNPKKNNVFDWEEVCLTSAYKELFNKYGINYQQGDIRALLCEQSDKAFYSSFMALMSLMLQMRNSITGRTDVDFLISPVKNSDGIFYDSRNYEAQENAILPKNADANGAYNIARKVLWAIGQFKKAEDEKLDKVKIAISNKEWLEYAQTSVKH

SEQ ID NO: 420 - protein, 1328 aa, Synthetic construct
SKLEKFTNCYSLSKTLRFKAIPVGKTQENIDNKRLLVEDEKRAEDYKGVKKLLDRYYLSFINDVLHSIKLKNLNNYISLFRKKTRTEKENKELENLEINLRKEIAKAFKGNEGYKSLFKKDIIETILPEFLDDKDEIALVNSFNGFTTAFTGFFDNRENMFSEEAKSTSIAFRCINENLTRYISNMDIFEKVDAIFDKHEVQEIKEKILNSDYDVEDFFEGEFFNFVLTQEGIDVYNAIIGGFVTESGEKIKGLNEYINLYNQKTKQKLPKFKPLYKQVLSDRESLSFYGEGSSGMNYFIVEVSEQEVKREKEKARELRRSQWWKNRIARGICHYCGEIFPPEELTMDHLVPVVRGGKSTRGNVVPACKECNNRKKYLLPVEWEEYLDSLESGYTSDEEVLEVFRNTLNKNSEIFSSIKKLEKLFKNFDEYSSAGIFVKNGPAISTISKDIFGEWNVIRDKWNAEYDDIHLKKKAVVTEKYEDDRRKSFKKIGSFSLEQLQEYADADLSVVEKLKEIIIQKVDEIYKVYGSSEKLFDADFVLEKSLKKNDAVVAIMKDLLDSVKSFENYIKAFFGEGKETNRDESFYGDFVLAYDILLKVDHIYDAIRNYVTQKPYSKDKFKLYFQNPQFMGGWDKDKETDYRATILRYGSKYYLAIMDKKYAKCLQKIDKDDVNGNYEKINYKLLPGPNKMLPKVFFSKKWMAYYNPSEDIQKIYKNGTFKKGDMFNLNDCHKLIDFFKDSISRYPKWSNAYDFNFSETEKYKDIAGFYREVEEQGYKVSFESASKKEVDKLVEEGKLYMFQIYNKDFSDKSHGTPNLHTMYFKLLFDENNHGQIRLSGGAELFMRRASLKKEELVVHPANSPIANKNPDNPKKTTTLSYDVYKDKRFSEDQYELHIPIAINKCPKNIFKINTEVRVLLKHDDNPYVIGIARGERNLLYIVVVDGKGNIVEQYSLNEIINNFNGIRIKTDYHSLLDKKEKERFEARQNWTSIENIKELKAGYISQVVHKICELVEKYDAVIALEDLNSGFKNSRVKVEKQVYQKFEKMLIDKLNYMVDKKSNPCATGGALKGYQITNKFESFKSMSTQNGFIFYIPAWLTSKIDPSTGFVNLLKTKYTSIADSKKFISSFDRIMYVPEEDLFEFALDYKNFSRTDADYIKKWKLYSYGNRIRIFRNPKKNNVFDWEEVCLTSAYKELFNKYGINYQQGDIRALLCEQSDKAFYSSFMALMSLMLQMRNSITGRTDVDFLISPVKNSDGIFYDSRNYEAQENAILPKNADANGAYNIARKVLWAIGQFKKAEDEKLDKVKIAISNKEWLEYAQTSVKH

SEQ ID NO: 421 - protein, 1441 aa, Synthetic construct
SKLEKFTNCYSLSKTLRFKAIPVGKTQENIDNKRLLVEDEKRAEDYKGVKKLLDRYYLSFINDVLHSIKLKNLNNYISLFRKKTRTEKENKELENLEINLRKEIAKAFKGNEGYKSLFKKDIIETILPEFLDDKDEIALVNSFNGFTTAFTGFFDNRENMFSEEAKSTSIAFRCINENLTRYISNMDIFEKVDAIFDKHEVQEIKEKILNSDYDVEDFFEGEFFNFVLTQEGIDVYNAIIGGFVTESGEKIKGLNEYINLYNQKTKQKLPKFKPLYKQVLSDRESLSFYGEGSSGPPSSFSKAKKEAVKIYLDYPTSFYCGCDITWKNKKKGIPELESCGYQVRKQEKRASRIEWEHVVPAWQFGHQRQCWQKGGRKNCTRNDKQFKSMEADLHNLVPAIGEVNGDRSNFRFSQWNGSKGAFYGQCAFKVDFKGRVAEPPAQSRGAIARTYLYMNNEYKFNLSKAQRQLMEAWNKQYPVSTWECTRDERIAKIQGNHNQFVYKACGYTSDEEVLEVFRNTLNKNSEIFSSIKKLEKLFKNFDEYSSAGIFVKNGPAISTISKDIFGEWNVIRDKWNAEYDDIHLKKKAVVTEKYEDDRRKSFKKIGSFSLEQLQEYADADLSVVEKLKEIIIQKVDEIYKVYGSSEKLFDADFVLEKSLKKNDAVVAIMKDLLDSVKSFENYIKAFFGEGKETNRDESFYGDFVLAYDILLKVDHIYDAIRNYVTQKPYSKDKFKLYFQNPQFMGGWDKDKETDYRATILRYGSKYYLAIMDKKYAKCLQKIDKDDVNGNYEKINYKLLPGPNKMLPKVFFSKKWMAYYNPSEDIQKIYKNGTFKKGDMFNLNDCHKLIDFFKDSISRYPKWSNAYDFNFSETEKYKDIAGFYREVEEQGYKVSFESASKKEVDKLVEEGKLYMFQIYNKDFSDKSHGTPNLHTMYFKLLFDENNHGQIRLSGGAELFMRRASLKKEELVVHPANSPIANKNPDNPKKTTTLSYDVYKDKRFSEDQYELHIPIAINKCPKNIFKINTEVRVLLKHDDNPYVIGIARGERNLLYIVVVDGKGNIVEQYSLNEIINNFNGIRIKTDYHSLLDKKEKERFEARQNWTSIENIKELKAGYISQVVHKICELVEKYDAVIALEDLNSGFKNSRVKVEKQVYQKFEKMLIDKLNYMVDKKSNPCATGGALKGYQITNKFESFKSMSTQNGFIFYIPAWLTSKIDPSTGFVNLLKTKYTSIADSKKFISSFDRIMYVPEEDLFEFALDYKNFSRTDADYIKKWKLYSYGNRIRIFRNPKKNNVFDWEEVCLTSAYKELFNKYGINYQQGDIRALLCEQSDKAFYSSFMALMSLMLQMRNSITGRTDVDFLISPVKNSDGIFYDSRNYEAQENAILPKNADANGAYNIARKVLWAIGQFKKAEDEKLDKVKIAISNKEWLEYAQTSVKH

SEQ ID NO: 422 - protein, 1506 aa, Synthetic construct
SKLEKFTNCYSLSKTLRFKAIPVGKTQENIDNKRLLVEDEKRAEDYKGVKKLLDRYYLSFINDVLHSIKLKNLNNYISLFRKKTRTEKENKELENLEINLRKEIAKAFKGNEGYKSLFKKDIIETILPEFLDDKDEIALVNSFNGFTTAFTGFFDNRENMFSEEAKSTSIAFRCINENLTRYISNMDIFEKVDAIFDKHEVQEIKEKILNSDYDVEDFFEGEFFNFVLTQEGIDVYNAIIGGFVTESGEKIKGLNEYINLYNQKTKQKLPKFKPLYKQVLSDRESLSFYGEGSSGWRRRREDARAAPGLLGRLPVLPVAAAAELPPVPGGPRGPGELAKYGLPGLAQLKSRESYVLCYDPRTRGALWVVEQLRPERLRGDGDRRECDFREDDSVHAYHRATNADYRGSGFDRGHLAAAANHRWSQKAMDDTFYLSNVAPQVPHLNQNAWNNLEKYSRSLTRSYQNVYVCTGPLFLPRTEADGKSYVKYQVIGKNHVAVPTHFFKVLILEAAGGQIELRTYVMPNAPVDEAIPLERFLVPIESIERASGLLFVPNILARAGSLKAITAGSKGYTSDEEVLEVFRNTLNKNSEIFSSIKKLEKLFKNFDEYSSAGIFVKNGPAISTISKDIFGEWNVIRDKWNAEYDDIHLKKKAVVTEKYEDDRRKSFKKIGSFSLEQLQEYADADLSVVEKLKEIIIQKVDEIYKVYGSSEKLFDADFVLEKSLKKNDAVVAIMKDLLDSVKSFENYIKAFFGEGKETNRDESFYGDFVLAYDILLKVDHIYDAIRNYVTQKPYSKDKFKLYFQNPQFMGGWDKDKETDYRATILRYGSKYYLAIMDKKYAKCLQKIDKDDVNGNYEKINYKLLPGPNKMLPKVFFSKKWMAYYNPSEDIQKIYKNGTFKKGDMFNLNDCHKLIDFFKDSISRYPKWSNAYDFNFSETEKYKDIAGFYREVEEQGYKVSFESASKKEVDKLVEEGKLYMFQIYNKDFSDKSHGTPNLHTMYFKLLFDENNHGQIRLSGGAELFMRRASLKKEELVVHPANSPIANKNPDNPKKTTTLSYDVYKDKRFSEDQYELHIPIAINKCPKNIFKINTEVRVLLKHDDNPYVIGIARGERNLLYIVVVDGKGNIVEQYSLNEIINNFNGIRIKTDYHSLLDKKEKERFEARQNWTSIENIKELKAGYISQVVHKICELVEKYDAVIALEDLNSGFKNSRVKVEKQVYQKFEKMLIDKLNYMVDKKSNPCATGGALKGYQITNKFESFKSMSTQNGFIFYIPAWLTSKIDPSTGFVNLLKTKYTSIADSKKFISSFDRIMYVPEEDLFEFALDYKNFSRTDADYIKKWKLYSYGNRIRIFRNPKKNNVFDWEEVCLTSAYKELFNKYGINYQQGDIRALLCEQSDKAFYSSFMALMSLMLQMRNSITGRTDVDFLISPVKNSDGIFYDSRNYEAQENAILPKNADANGAYNIARKVLWAIGQFKKAEDEKLDKVKIAISNKEWLEYAQTSVKH

SEQ ID NO: 423 - protein, 1508 aa, Synthetic construct
SKLEKFTNCYSLSKTLRFKAIPVGKTQENIDNKRLLVEDEKRAEDYKGVKKLLDRYYLSFINDVLHSIKLKNLNNYISLFRKKTRTEKENKELENLEINLRKEIAKAFKGNEGYKSLFKKDIIETILPEFLDDKDEIALVNSFNGFTTAFTGFFDNRENMFSEEAKSTSIAFRCINENLTRYISNMDIFEKVDAIFDKHEVQEIKEKILNSDYDVEDFFEGEFFNFVLTQEGIDVYNAIIGGFVTESGEKIKGLNEYINLYNQKTKQKLPKFKPLYKQVLSDRESLSFYGEGSSGWSKEGHVMTCRIAQGLLNDEAAHAVKMLLPEYVNGDLSALCVWPDQVRHWYKYKWTSPLHFIDTPDKACNFDYERDCHDQHGVKDMCVAGAIQNFTTQLSHYREGTSDRRYNMTEALLFLSHFMGDIHQPMHVGFTSDAGGNSIDLRWFRHKSNLHHVWDREIILTAAKDYYAKDINLLEEDIEGNFTDGIWSDDLASWRECGNVFSCVNKFATESINIACKWGYKGVEAGETLSDDYFNSRLPIVMKRVAQGGIRLAMLLNNVFGASQQEDSVVATGYTSDEEVLEVFRNTLNKNSEIFSSIKKLEKLFKNFDEYSSAGIFVKNGPAISTISKDIFGEWNVIRDKWNAEYDDIHLKKKAVVTEKYEDDRRKSFKKIGSFSLEQLQEYADADLSVVEKLKEIIIQKVDEIYKVYGSSEKLFDADFVLEKSLKKNDAVVAIMKDLLDSVKSFENYIKAFFGEGKETNRDESFYGDFVLAYDILLKVDHIYDAIRNYVTQKPYSKDKFKLYFQNPQFMGGWDKDKETDYRATILRYGSKYYLAIMDKKYAKCLQKIDKDDVNGNYEKINYKLLPGPNKMLPKVFFSKKWMAYYNPSEDIQKIYKNGTFKKGDMFNLNDCHKLIDFFKDSISRYPKWSNAYDFNFSETEKYKDIAGFYREVEEQGYKVSFESASKKEVDKLVEEGKLYMFQIYNKDFSDKSHGTPNLHTMYFKLLFDENNHGQIRLSGGAELFMRRASLKKEELVVHPANSPIANKNPDNPKKTTTLSYDVYKDKRFSEDQYELHIPIAINKCPKNIFKINTEVRVLLKHDDNPYVIGIARGERNLLYIVVVDGKGNIVEQYSLNEIINNFNGIRIKTDYHSLLDKKEKERFEARQNWTSIENIKELKAGYISQVVHKICELVEKYDAVIALEDLNSGFKNSRVKVEKQVYQKFEKMLIDKLNYMVDKKSNPCATGGALKGYQITNKFESFKSMSTQNGFIFYIPAWLTSKIDPSTGFVNLLKTKYTSIADSKKFISSFDRIMYVPEEDLFEFALDYKNFSRTDADYIKKWKLYSYGNRIRIFRNPKKNNVFDWEEVCLTSAYKELFNKYGINYQQGDIRALLCEQSDKAFYSSFMALMSLMLQMRNSITGRTDVDFLISPVKNSDGIFYDSRNYEAQENAILPKNADANGAYNIARKVLWAIGQFKKAEDEKLDKVKIAISNKEWLEYAQTSVKH

SEQ ID NO: 424 - protein, 1318 aa, Synthetic construct
SKLEKFTNCYSLSKTLRFKAIPVGKTQENIDNKRLLVEDEKRAEDYKGVKKLLDRYYLSFINDVLHSIKLKNLNNYISLFRKKTRTEKENKELENLEINLRKEIAKAFKGNEGYKSLFKKDIIETILPEFLDDKDEIALVNSFNGFTTAFTGFFDNRENMFSEEAKSTSIAFRCINENLTRYISNMDIFEKVDAIFDKHEVQEIKEKILNSDYDVEDFFEGEFFNFVLTQEGIDVYNAIIGGFVTESGEKIKGLNEYINLYNQKTKQKLPKFKPLYKQVLSDRESLSFYGEGSSGMKSKISEYTEKEFLEFVKDIYTNNKKKFPTEESHIQAVLEFKKLTEHPSGSDLLYYPNENREDSPAGVVKEVKEWRASKGLPGFKAGGYTSDEEVLEVFRNTLNKNSEIFSSIKKLEKLFKNFDEYSSAGIFVKNGPAISTISKDIFGEWNVIRDKWNAEYDDIHLKKKAVVTEKYEDDRRKSFKKIGSFSLEQLQEYADADLSVVEKLKEIIIQKVDEIYKVYGSSEKLFDADFVLEKSLKKNDAVVAIMKDLLDSVKSFENYIKAFFGEGKETNRDESFYGDFVLAYDILLKVDHIYDAIRNYVTQKPYSKDKFKLYFQNPQFMGGWDKDKETDYRATILRYGSKYYLAIMDKKYAKCLQKIDKDDVNGNYEKINYKLLPGPNKMLPKVFFSKKWMAYYNPSEDIQKIYKNGTFKKGDMFNLNDCHKLIDFFKDSISRYPKWSNAYDFNFSETEKYKDIAGFYREVEEQGYKVSFESASKKEVDKLVEEGKLYMFQIYNKDFSDKSHGTPNLHTMYFKLLFDENNHGQIRLSGGAELFMRRASLKKEELVVHPANSPIANKNPDNPKKTTTLSYDVYKDKRFSEDQYELHIPIAINKCPKNIFKINTEVRVLLKHDDNPYVIGIARGERNLLYIVVVDGKGNIVEQYSLNEIINNFNGIRIKTDYHSLLDKKEKERFEARQNWTSIENIKELKAGYISQVVHKICELVEKYDAVIALEDLNSGFKNSRVKVEKQVYQKFEKMLIDKLNYMVDKKSNPCATGGALKGYQITNKFESFKSMSTQNGFIFYIPAWLTSKIDPSTGFVNLLKTKYTSIADSKKFISSFDRIMYVPEEDLFEFALDYKNFSRTDADYIKKWKLYSYGNRIRIFRNPKKNNVFDWEEVCLTSAYKELFNKYGINYQQGDIRALLCEQSDKAFYSSFMALMSLMLQMRNSITGRTDVDFLISPVKNSDGIFYDSRNYEAQENAILPKNADANGAYNIARKVLWAIGQFKKAEDEKLDKVKIAISNKEWLEYAQTSVKH

SEQ ID NO: 425 - protein, 1318 aa, Synthetic construct
SKLEKFTNCYSLSKTLRFKAIPVGKTQENIDNKRLLVEDEKRAEDYKGVKKLLDRYYLSFINDVLHSIKLKNLNNYISLFRKKTRTEKENKELENLEINLRKEIAKAFKGNEGYKSLFKKDIIETILPEFLDDKDEIALVNSFNGFTTAFTGFFDNRENMFSEEAKSTSIAFRCINENLTRYISNMDIFEKVDAIFDKHEVQEIKEKILNSDYDVEDFFEGEFFNFVLTQEGIDVYNAIIGGFVTESGEKIKGLNEYINLYNQKTKQKLPKFKPLYKQVLSDRESLSFYGEGSSGMELKNSISDYTEAEFVQLLKEIEKENVAATDDVLDVLLEHFVKITEHPDGTDLIYYPSDNRDDSPEGIVKEIKEWRAANGKPGFKQGGYTSDEEVLEVFRNTLNKNSEIFSSIKKLEKLFKNFDEYSSAGIFVKNGPAISTISKDIFGEWNVIRDKWNAEYDDIHLKKKAVVTEKYEDDRRKSFKKIGSFSLEQLQEYADADLSVVEKLKEIIIQKVDEIYKVYGSSEKLFDADFVLEKSLKKNDAVVAIMKDLLDSVKSFENYIKAFFGEGKETNRDESFYGDFVLAYDILLKVDHIYDAIRNYVTQKPYSKDKFKLYFQNPQFMGGWDKDKETDYRATILRYGSKYYLAIMDKKYAKCLQKIDKDDVNGNYEKINYKLLPGPNKMLPKVFFSKKWMAYYNPSEDIQKIYKNGTFKKGDMFNLNDCHKLIDFFKDSISRYPKWSNAYDFNFSETEKYKDIAGFYREVEEQGYKVSFESASKKEVDKLVEEGKLYMFQIYNKDFSDKSHGTPNLHTMYFKLLFDENNHGQIRLSGGAELFMRRASLKKEELVVHPANSPIANKNPDNPKKTTTLSYDVYKDKRFSEDQYELHIPIAINKCPKNIFKINTEVRVLLKHDDNPYVIGIARGERNLLYIVVVDGKGNIVEQYSLNEIINNFNGIRIKTDYHSLLDKKEKERFEARQNWTSIENIKELKAGYISQVVHKICELVEKYDAVIALEDLNSGFKNSRVKVEKQVYQKFEKMLIDKLNYMVDKKSNPCATGGALKGYQITNKFESFKSMSTQNGFIFYIPAWLTSKIDPSTGFVNLLKTKYTSIADSKKFISSFDRIMYVPEEDLFEFALDYKNFSRTDADYIKKWKLYSYGNRIRIFRNPKKNNVFDWEEVCLTSAYKELFNKYGINYQQGDIRALLCEQSDKAFYSSFMALMSLMLQMRNSITGRTDVDFLISPVKNSDGIFYDSRNYEAQENAILPKNADANGAYNIARKVLWAIGQFKKAEDEKLDKVKIAISNKEWLEYAQTSVKH

SEQ ID NO: 426 - protein, 1341 aa, Synthetic construct
SKLEKFTNCYSLSKTLRFKAIPVGKTQENIDNKRLLVEDEKRAEDYKGVKKLLDRYYLSFINDVLHSIKLKNLNNYISLFRKKTRTEKENKELENLEINLRKEIAKAFKGNEGYKSLFKKDIIETILPEFLDDKDEIALVNSFNGFTTAFTGFFDNRENMFSEEAKSTSIAFRCINENLTRYISNMDIFEKVDAIFDKHEVQEIKEKILNSDYDVEDFFEGEFFNFVLTQEGIDVYNAIIGGFVTESGEKIKGLNEYINLYNQKTKQKLPKFKPLYKQVLSDRESLSFYGEGSSGGRTPTAEERRIANALGALPCIACYMHGVISNEVSLHHIAGRTAPGCHKKQLPLCRWHHQHAAPAEVREKYPWLVPVHADGVVGGKKEFTLLNKSEMELLADAYEMANIMHGYTSDEEVLEVFRNTLNKNSEIFSSIKKLEKLFKNFDEYSSAGIFVKNGPAISTISKDIFGEWNVIRDKWNAEYDDIHLKKKAVVTEKYEDDRRKSFKKIGSFSLEQLQEYADADLSVVEKLKEIIIQKVDEIYKVYGSSEKLFDADFVLEKSLKKNDAVVAIMKDLLDSVKSFENYIKAFFGEGKETNRDESFYGDFVLAYDILLKVDHIYDAIRNYVTQKPYSKDKFKLYFQNPQFMGGWDKDKETDYRATILRYGSKYYLAIMDKKYAKCLQKIDKDDVNGNYEKINYKLLPGPNKMLPKVFFSKKWMAYYNPSEDIQKIYKNGTFKKGDMFNLNDCHKLIDFFKDSISRYPKWSNAYDFNFSETEKYKDIAGFYREVEEQGYKVSFESASKKEVDKLVEEGKLYMFQIYNKDFSDKSHGTPNLHTMYFKLLFDENNHGQIRLSGGAELFMRRASLKKEELVVHPANSPIANKNPDNPKKTTTLSYDVYKDKRFSEDQYELHIPIAINKCPKNIFKINTEVRVLLKHDDNPYVIGIARGERNLLYIVVVDGKGNIVEQYSLNEIINNFNGIRIKTDYHSLLDKKEKERFEARQNWTSIENIKELKAGYISQVVHKICELVEKYDAVIALEDLNSGFKNSRVKVEKQVYQKFEKMLIDKLNYMVDKKSNPCATGGALKGYQITNKFESFKSMSTQNGFIFYIPAWLTSKIDPSTGFVNLLKTKYTSIADSKKFISSFDRIMYVPEEDLFEFALDYKNFSRTDADYIKKWKLYSYGNRIRIFRNPKKNNVFDWEEVCLTSAYKELFNKYGINYQQGDIRALLCEQSDKAFYSSFMALMSLMLQMRNSITGRTDVDFLISPVKNSDGIFYDSRNYEAQENAILPKNADANGAYNIARKVLWAIGQFKKAEDEKLDKVKIAISNKEWLEYAQTSVKH

SEQ ID NO: 427 - protein, 1336 aa, Synthetic construct
SKLEKFTNCYSLSKTLRFKAIPVGKTQENIDNKRLLVEDEKRAEDYKGVKKLLDRYYLSFINDVLHSIKLKNLNNYISLFRKKTRTEKENKELENLEINLRKEIAKAFKGNEGYKSLFKKDIIETILPEFLDDKDEIALVNSFNGFTTAFTGFFDNRENMFSEEAKSTSIAFRCINENLTRYISNMDIFEKVDAIFDKHEVQEIKEKILNSDYDVEDFFEGEFFNFVLTQEGIDVYNAIIGGFVTESGEKIKGLNEYINLYNQKTKQKLPKFKPLYKQVLSDRESLSFYGEGSSGMEWKDIKGYEGHYQVSNTGEVYSIKSGKTLKHQIPKDGYHRIGLFKGGKGKTFQVHRLVAIHFCEGYEEGLVVDHKDGNKDNNLSTNLRWVTQKINVENQMSRGTGYTSDEEVLEVFRNTLNKNSEIFSSIKKLEKLFKNFDEYSSAGIFVKNGPAISTISKDIFGEWNVIRDKWNAEYDDIHLKKKAVVTEKYEDDRRKSFKKIGSFSLEQLQEYADADLSVVEKLKEIIIQKVDEIYKVYGSSEKLFDADFVLEKSLKKNDAVVAIMKDLLDSVKSFENYIKAFFGEGKETNRDESFYGDFVLAYDILLKVDHIYDAIRNYVTQKPYSKDKFKLYFQNPQFMGGWDKDKETDYRATILRYGSKYYLAIMDKKYAKCLQKIDKDDVNGNYEKINYKLLPGPNKMLPKVFFSKKWMAYYNPSEDIQKIYKNGTFKKGDMFNLNDCHKLIDFFKDSISRYPKWSNAYDFNFSETEKYKDIAGFYREVEEQGYKVSFESASKKEVDKLVEEGKLYMFQIYNKDFSDKSHGTPNLHTMYFKLLFDENNHGQIRLSGGAELFMRRASLKKEELVVHPANSPIANKNPDNPKKTTTLSYDVYKDKRFSEDQYELHIPIAINKCPKNIFKINTEVRVLLKHDDNPYVIGIARGERNLLYIVVVDGKGNIVEQYSLNEIINNFNGIRIKTDYHSLLDKKEKERFEARQNWTSIENIKELKAGYISQVVHKICELVEKYDAVIALEDLNSGFKNSRVKVEKQVYQKFEKMLIDKLNYMVDKKSNPCATGGALKGYQITNKFESFKSMSTQNGFIFYIPAWLTSKIDPSTGFVNLLKTKYTSIADSKKFISSFDRIMYVPEEDLFEFALDYKNFSRTDADYIKKWKLYSYGNRIRIFRNPKKNNVFDWEEVCLTSAYKELFNKYGINYQQGDIRALLCEQSDKAFYSSFMALMSLMLQMRNSITGRTDVDFLISPVKNSDGIFYDSRNYEAQENAILPKNADANGAYNIARKVLWAIGQFKKAEDEKLDKVKIAISNKEWLEYAQTSVKH

SEQ ID NO: 428 - protein, 1501 aa, Synthetic construct
SKLEKFTNCYSLSKTLRFKAIPVGKTQENIDNKRLLVEDEKRAEDYKGVKKLLDRYYLSFINDVLHSIKLKNLNNYISLFRKKTRTEKENKELENLEINLRKEIAKAFKGNEGYKSLFKKDIIETILPEFLDDKDEIALVNSFNGFTTAFTGFFDNRENMFSEEAKSTSIAFRCINENLTRYISNMDIFEKVDAIFDKHEVQEIKEKILNSDYDVEDFFEGEFFNFVLTQEGIDVYNAIIGGFVTESGEKIKGLNEYINLYNQKTKQKLPKFKPLYKQVLSDRESLSFYGEGSSGWGALGHATVAYVAQHYVSPEAASWAQGILGSSSSSYLASIASWADEYRLTSAGKWSASLHFIDAEDNPPTNCNVDYERDCGSSGCSISAIANYTQRVSDSSLSSENHAEALRFLVHFIGDMTQPLHDEAYAVGGNKINVTFDGYHDNLHSDWDTYMPQKLIGGHALSDAESWAKTLVQNIESGNYTAQAIGWIKGDNISEPITTATRWASDANALVCTVVMPHGAAALQTGDLYPTYYDSVIDTIELQIAKGGYRLANWINEIHGSEIAKGYTSDEEVLEVFRNTLNKNSEIFSSIKKLEKLFKNFDEYSSAGIFVKNGPAISTISKDIFGEWNVIRDKWNAEYDDIHLKKKAVVTEKYEDDRRKSFKKIGSFSLEQLQEYADADLSVVEKLKEIIIQKVDEIYKVYGSSEKLFDADFVLEKSLKKNDAVVAIMKDLLDSVKSFENYIKAFFGEGKETNRDESFYGDFVLAYDILLKVDHIYDAIRNYVTQKPYSKDKFKLYFQNPQFMGGWDKDKETDYRATILRYGSKYYLAIMDKKYAKCLQKIDKDDVNGNYEKINYKLLPGPNKMLPKVFFSKKWMAYYNPSEDIQKIYKNGTFKKGDMFNLNDCHKLIDFFKDSISRYPKWSNAYDFNFSETEKYKDIAGFYREVEEQGYKVSFESASKKEVDKLVEEGKLYMFQIYNKDFSDKSHGTPNLHTMYFKLLFDENNHGQIRLSGGAELFMRRASLKKEELVVHPANSPIANKNPDNPKKTTTLSYDVYKDKRFSEDQYELHIPIAINKCPKNIFKINTEVRVLLKHDDNPYVIGIARGERNLLYIVVVDGKGNIVEQYSLNEIINNFNGIRIKTDYHSLLDKKEKERFEARQNWTSIENIKELKAGYISQVVHKICELVEKYDAVIALEDLNSGFKNSRVKVEKQVYQKFEKMLIDKLNYMVDKKSNPCATGGALKGYQITNKFESFKSMSTQNGFIFYIPAWLTSKIDPSTGFVNLLKTKYTSIADSKKFISSFDRIMYVPEEDLFEFALDYKNFSRTDADYIKKWKLYSYGNRIRIFRNPKKNNVFDWEEVCLTSAYKELFNKYGINYQQGDIRALLCEQSDKAFYSSFMALMSLMLQMRNSITGRTDVDFLISPVKNSDGIFYDSRNYEAQENAILPKNADANGAYNIARKVLWAIGQFKKAEDEKLDKVKIAISNKEWLEYAQTSVKH

SEQ ID NO: 429 - protein, 1498 aa, Synthetic construct
SKLEKFTNCYSLSKTLRFKAIPVGKTQENIDNKRLLVEDEKRAEDYKGVKKLLDRYYLSFINDVLHSIKLKNLNNYISLFRKKTRTEKENKELENLEINLRKEIAKAFKGNEGYKSLFKKDIIETILPEFLDDKDEIALVNSFNGFTTAFTGFFDNRENMFSEEAKSTSIAFRCINENLTRYISNMDIFEKVDAIFDKHEVQEIKEKILNSDYDVEDFFEGEFFNFVLTQEGIDVYNAIIGGFVTESGEKIKGLNEYINLYNQKTKQKLPKFKPLYKQVLSDRESLSFYGEGSSGWGNLGHETVAYIAQSFVASSTESFCQNILGDDSTSYLANVATWADTYKYTDAGEFSKPYHFIDAQDNPPQSCGVDYDRDCGSAGCSISAIQNYTNILLESPNGSEALNALKFVVHIIGDIHQPLHDENLEAGGNGIDVTYDGETTNLHHIWDTNMPEEAAGGYSLSVAKTYADLLTERIKTGTYSSKKDSWTDGIDIKDPVSTSMIWAADANTYVCSTVLDDGLAYINSTDLSGEYYDKSQPVFEELIAKAGYRLAAWLDLIASQPSGYTSDEEVLEVFRNTLNKNSEIFSSIKKLEKLFKNFDEYSSAGIFVKNGPAISTISKDIFGEWNVIRDKWNAEYDDIHLKKKAVVTEKYEDDRRKSFKKIGSFSLEQLQEYADADLSVVEKLKEIIIQKVDEIYKVYGSSEKLFDADFVLEKSLKKNDAVVAIMKDLLDSVKSFENYIKAFFGEGKETNRDESFYGDFVLAYDILLKVDHIYDAIRNYVTQKPYSKDKFKLYFQNPQFMGGWDKDKETDYRATILRYGSKYYLAIMDKKYAKCLQKIDKDDVNGNYEKINYKLLPGPNKMLPKVFFSKKWMAYYNPSEDIQKIYKNGTFKKGDMFNLNDCHKLIDFFKDSISRYPKWSNAYDFNFSETEKYKDIAGFYREVEEQGYKVSFESASKKEVDKLVEEGKLYMFQIYNKDFSDKSHGTPNLHTMYFKLLFDENNHGQIRLSGGAELFMRRASLKKEELVVHPANSPIANKNPDNPKKTTTLSYDVYKDKRFSEDQYELHIPIAINKCPKNIFKINTEVRVLLKHDDNPYVIGIARGERNLLYIVVVDGKGNIVEQYSLNEIINNFNGIRIKTDYHSLLDKKEKERFEARQNWTSIENIKELKAGYISQVVHKICELVEKYDAVIALEDLNSGFKNSRVKVEKQVYQKFEKMLIDKLNYMVDKKSNPCATGGALKGYQITNKFESFKSMSTQNGFIFYIPAWLTSKIDPSTGFVNLLKTKYTSIADSKKFISSFDRIMYVPEEDLFEFALDYKNFSRTDADYIKKWKLYSYGNRIRIFRNPKKNNVFDWEEVCLTSAYKELFNKYGINYQQGDIRALLCEQSDKAFYSSFMALMSLMLQMRNSITGRTDVDFLISPVKNSDGIFYDSRNYEAQENAILPKNADANGAYNIARKVLWAIGQFKKAEDEKLDKVKIAISNKEWLEYAQTSVKH

SEQ ID NO: 430 - protein, 1317 aa, Synthetic construct
SKLEKFTNCYSLSKTLRFKAIPVGKTQENIDNKRLLVEDEKRAEDYKGVKKLLDRYYLSFINDVLHSIKLKNLNNYISLFRKKTRTEKENKELENLEINLRKEIAKAFKGNEGYKSLFKKDIIETILPEFLDDKDEIALVNSFNGFTTAFTGFFDNRENMFSEEAKSTSIAFRCINENLTRYISNMDIFEKVDAIFDKHEVQEIKEKILNSDYDVEDFFEGEFFNFVLTQEGIDVYNAIIGGFVTESGEKIKGLNEYINLYNQKTKQKLPKFKPLYKQVLSDRESLSFYGEGSSGMELKHSISDYTEAEFLQLVTTICNADTSSEEELVKLVTHFEEMTEHPSGSDLIYYPKEGDDDSPSGIVNTVKQWRAANGKSGFKQGGYTSDEEVLEVFRNTLNKNSEIFSSIKKLEKLFKNFDEYSSAGIFVKNGPAISTISKDIFGEWNVIRDKWNAEYDDIHLKKKAVVTEKYEDDRRKSFKKIGSFSLEQLQEYADADLSVVEKLKEIIIQKVDEIYKVYGSSEKLFDADFVLEKSLKKNDAVVAIMKDLLDSVKSFENYIKAFFGEGKETNRDESFYGDFVLAYDILLKVDHIYDAIRNYVTQKPYSKDKFKLYFQNPQFMGGWDKDKETDYRATILRYGSKYYLAIMDKKYAKCLQKIDKDDVNGNYEKINYKLLPGPNKMLPKVFFSKKWMAYYNPSEDIQKIYKNGTFKKGDMFNLNDCHKLIDFFKDSISRYPKWSNAYDFNFSETEKYKDIAGFYREVEEQGYKVSFESASKKEVDKLVEEGKLYMFQIYNKDFSDKSHGTPNLHTMYFKLLFDENNHGQIRLSGGAELFMRRASLKKEELVVHPANSPIANKNPDNPKKTTTLSYDVYKDKRFSEDQYELHIPIAINKCPKNIFKINTEVRVLLKHDDNPYVIGIARGERNLLYIVVVDGKGNIVEQYSLNEIINNFNGIRIKTDYHSLLDKKEKERFEARQNWTSIENIKELKAGYISQVVHKICELVEKYDAVIALEDLNSGFKNSRVKVEKQVYQKFEKMLIDKLNYMVDKKSNPCATGGALKGYQITNKFESFKSMSTQNGFIFYIPAWLTSKIDPSTGFVNLLKTKYTSIADSKKFISSFDRIMYVPEEDLFEFALDYKNFSRTDADYIKKWKLYSYGNRIRIFRNPKKNNVFDWEEVCLTSAYKELFNKYGINYQQGDIRALLCEQSDKAFYSSFMALMSLMLQMRNSITGRTDVDFLISPVKNSDGIFYDSRNYEAQENAILPKNADANGAYNIARKVLWAIGQFKKAEDEKLDKVKIAISNKEWLEYAQTSVKH

SEQ ID NO: 431 - protein, 1328 aa, Synthetic construct
SKLEKFTNCYSLSKTLRFKAIPVGKTQENIDNKRLLVEDEKRAEDYKGVKKLLDRYYLSFINDVLHSIKLKNLNNYISLFRKKTRTEKENKELENLEINLRKEIAKAFKGNEGYKSLFKKDIIETILPEFLDDKDEIALVNSFNGFTTAFTGFFDNRENMFSEEAKSTSIAFRCINENLTRYISNMDIFEKVDAIFDKHEVQEIKEKILNSDYDVEDFFEGEFFNFVLTQEGIDVYNAIIGGFVTESGEKIKGLNEYINLYNQKTKQKLPKFKPLYKQVLSDRESLSFYGEGSSGMLLTGKLYKEEKQKFYDAQNGKCLICQRELNPDVQANHLDHDHELNGPKAGKVRGLLCNLCNAAEGQMKHKFNRSGLKGQGVDYLEWLENLLTYLKSGYTSDEEVLEVFRNTLNKNSEIFSSIKKLEKLFKNFDEYSSAGIFVKNGPAISTISKDIFGEWNVIRDKWNAEYDDIHLKKKAVVTEKYEDDRRKSFKKIGSFSLEQLQEYADADLSVVEKLKEIIIQKVDEIYKVYGSSEKLFDADFVLEKSLKKNDAVVAIMKDLLDSVKSFENYIKAFFGEGKETNRDESFYGDFVLAYDILLKVDHIYDAIRNYVTQKPYSKDKFKLYFQNPQFMGGWDKDKETDYRATILRYGSKYYLAIMDKKYAKCLQKIDKDDVNGNYEKINYKLLPGPNKMLPKVFFSKKWMAYYNPSEDIQKIYKNGTFKKGDMFNLNDCHKLIDFFKDSISRYPKWSNAYDFNFSETEKYKDIAGFYREVEEQGYKVSFESASKKEVDKLVEEGKLYMFQIYNKDFSDKSHGTPNLHTMYFKLLFDENNHGQIRLSGGAELFMRRASLKKEELVVHPANSPIANKNPDNPKKTTTLSYDVYKDKRFSEDQYELHIPIAINKCPKNIFKINTEVRVLLKHDDNPYVIGIARGERNLLYIVVVDGKGNIVEQYSLNEIINNFNGIRIKTDYHSLLDKKEKERFEARQNWTSIENIKELKAGYISQVVHKICELVEKYDAVIALEDLNSGFKNSRVKVEKQVYQKFEKMLIDKLNYMVDKKSNPCATGGALKGYQITNKFESFKSMSTQNGFIFYIPAWLTSKIDPSTGFVNLLKTKYTSIADSKKFISSFDRIMYVPEEDLFEFALDYKNFSRTDADYIKKWKLYSYGNRIRIFRNPKKNNVFDWEEVCLTSAYKELFNKYGINYQQGDIRALLCEQSDKAFYSSFMALMSLMLQMRNSITGRTDVDFLISPVKNSDGIFYDSRNYEAQENAILPKNADANGAYNIARKVLWAIGQFKKAEDEKLDKVKIAISNKEWLEYAQTSVKH

SEQ ID NO: 432 - protein, 1438 aa, Synthetic construct
SKLEKFTNCYSLSKTLRFKAIPVGKTQENIDNKRLLVEDEKRAEDYKGVKKLLDRYYLSFINDVLHSIKLKNLNNYISLFRKKTRTEKENKELENLEINLRKEIAKAFKGNEGYKSLFKKDIIETILPEFLDDKDEIALVNSFNGFTTAFTGFFDNRENMFSEEAKSTSIAFRCINENLTRYISNMDIFEKVDAIFDKHEVQEIKEKILNSDYDVEDFFEGEFFNFVLTQEGIDVYNAIIGGFVTESGEKIKGLNEYINLYNQKTKQKLPKFKPLYKQVLSDRESLSFYGEGSSGSFSHAKNEAVKIYRDHPVSFYCGCEIRWQGKKGIPDLESCGYQVRKNENRASRIEWEHVVPAWQFGHQLQCWQQGGRKNCTRTSPEFNQMEADLHNLTPAIGEVNGDRSNFSFSQWNGVDGVTYGQCEMQVNFKERTAMPPERARGAIARTYLYMSEQYGLRLSKAQSQLMQAWNNQYPVSEWECVRDQRIEKVQGNSNRFVREQCPGYTSDEEVLEVFRNTLNKNSEIFSSIKKLEKLFKNFDEYSSAGIFVKNGPAISTISKDIFGEWNVIRDKWNAEYDDIHLKKKAVVTEKYEDDRRKSFKKIGSFSLEQLQEYADADLSVVEKLKEIIIQKVDEIYKVYGSSEKLFDADFVLEKSLKKNDAVVAIMKDLLDSVKSFENYIKAFFGEGKETNRDESFYGDFVLAYDILLKVDHIYDAIRNYVTQKPYSKDKFKLYFQNPQFMGGWDKDKETDYRATILRYGSKYYLAIMDKKYAKCLQKIDKDDVNGNYEKINYKLLPGPNKMLPKVFFSKKWMAYYNPSEDIQKIYKNGTFKKGDMFNLNDCHKLIDFFKDSISRYPKWSNAYDFNFSETEKYKDIAGFYREVEEQGYKVSFESASKKEVDKLVEEGKLYMFQIYNKDFSDKSHGTPNLHTMYFKLLFDENNHGQIRLSGGAELFMRRASLKKEELVVHPANSPIANKNPDNPKKTTTLSYDVYKDKRFSEDQYELHIPIAINKCPKNIFKINTEVRVLLKHDDNPYVIGIARGERNLLYIVVVDGKGNIVEQYSLNEIINNFNGIRIKTDYHSLLDKKEKERFEARQNWTSIENIKELKAGYISQVVHKICELVEKYDAVIALEDLNSGFKNSRVKVEKQVYQKFEKMLIDKLNYMVDKKSNPCATGGALKGYQITNKFESFKSMSTQNGFIFYIPAWLTSKIDPSTGFVNLLKTKYTSIADSKKFISSFDRIMYVPEEDLFEFALDYKNFSRTDADYIKKWKLYSYGNRIRIFRNPKKNNVFDWEEVCLTSAYKELFNKYGINYQQGDIRALLCEQSDKAFYSSFMALMSLMLQMRNSITGRTDVDFLISPVKNSDGIFYDSRNYEAQENAILPKNADANGAYNIARKVLWAIGQFKKAEDEKLDKVKIAISNKEWLEYAQTSVKH

SEQ ID NO: 433 - protein, 1480 aa, Synthetic construct
SKLEKFTNCYSLSKTLRFKAIPVGKTQENIDNKRLLVEDEKRAEDYKGVKKLLDRYYLSFINDVLHSIKLKNLNNYISLFRKKTRTEKENKELENLEINLRKEIAKAFKGNEGYKSLFKKDIIETILPEFLDDKDEIALVNSFNGFTTAFTGFFDNRENMFSEEAKSTSIAFRCINENLTRYISNMDIFEKVDAIFDKHEVQEIKEKILNSDYDVEDFFEGEFFNFVLTQEGIDVYNAIIGGFVTESGEKIKGLNEYINLYNQKTKQKLPKFKPLYKQVLSDRESLSFYGEGSSGADLPALPGGPAGGTGELAKYGLPGVAQLRSRESYVLSYDPRTRGALWVLEQLRPERLRGDGDRSACDFREDDSVHAYHRATNADYRGSGFDRGHLAAAANHRWSQRAMDDTFYLSNVAPQVPHLNQNAWNNLERYSRSLTRTYQNVYVCTGPLFLPRTEADGKSYVKYQVIGKNHVAVPTHFFKVLILEAAGGQIELRSYVMPNAPVDETIPLERFLVPIESIERASGLLFVPNILARAGNLKAITAGSGYTSDEEVLEVFRNTLNKNSEIFSSIKKLEKLFKNFDEYSSAGIFVKNGPAISTISKDIFGEWNVIRDKWNAEYDDIHLKKKAVVTEKYEDDRRKSFKKIGSFSLEQLQEYADADLSVVEKLKEIIIQKVDEIYKVYGSSEKLFDADFVLEKSLKKNDAVVAIMKDLLDSVKSFENYIKAFFGEGKETNRDESFYGDFVLAYDILLKVDHIYDAIRNYVTQKPYSKDKFKLYFQNPQFMGGWDKDKETDYRATILRYGSKYYLAIMDKKYAKCLQKIDKDDVNGNYEKINYKLLPGPNKMLPKVFFSKKWMAYYNPSEDIQKIYKNGTFKKGDMFNLNDCHKLIDFFKDSISRYPKWSNAYDFNFSETEKYKDIAGFYREVEEQGYKVSFESASKKEVDKLVEEGKLYMFQIYNKDFSDKSHGTPNLHTMYFKLLFDENNHGQIRLSGGAELFMRRASLKKEELVVHPANSPIANKNPDNPKKTTTLSYDVYKDKRFSEDQYELHIPIAINKCPKNIFKINTEVRVLLKHDDNPYVIGIARGERNLLYIVVVDGKGNIVEQYSLNEIINNFNGIRIKTDYHSLLDKKEKERFEARQNWTSIENIKELKAGYISQVVHKICELVEKYDAVIALEDLNSGFKNSRVKVEKQVYQKFEKMLIDKLNYMVDKKSNPCATGGALKGYQITNKFESFKSMSTQNGFIFYIPAWLTSKIDPSTGFVNLLKTKYTSIADSKKFISSFDRIMYVPEEDLFEFALDYKNFSRTDADYIKKWKLYSYGNRIRIFRNPKKNNVFDWEEVCLTSAYKELFNKYGINYQQGDIRALLCEQSDKAFYSSFMALMSLMLQMRNSITGRTDVDFLISPVKNSDGIFYDSRNYEAQENAILPKNADANGAYNIARKVLWAIGQFKKAEDEKLDKVKIAISNKEWLEYAQTSVKH

SEQ ID NO: 434 - protein, 1382 aa, Synthetic construct
SKLEKFTNCYSLSKTLRFKAIPVGKTQENIDNKRLLVEDEKRAEDYKGVKKLLDRYYLSFINDVLHSIKLKNLNNYISLFRKKTRTEKENKELENLEINLRKEIAKAFKGNEGYKSLFKKDIIETILPEFLDDKDEIALVNSFNGFTTAFTGFFDNRENMFSEEAKSTSIAFRCINENLTRYISNMDIFEKVDAIFDKHEVQEIKEKILNSDYDVEDFFEGEFFNFVLTQEGIDVYNAIIGGFVTESGEKIKGLNEYINLYNQKTKQKLPKFKPLYKQVLSDRESLSFYGEGSSGEKNSKDAQKMINEMQKRNRQTNERIEEIIRTTGKENAKYLIEKIKLHDMQEGKCLYSLEAIPLEDLLNNPFNYEVDHIIPRSVSFDNSFNNKVLVKQEENSKKGNRTPFQYLSSSDSKISYETFKKHILNLAKGKGRISKTKKEYLLEERDGYTSDEEVLEVFRNTLNKNSEIFSSIKKLEKLFKNFDEYSSAGIFVKNGPAISTISKDIFGEWNVIRDKWNAEYDDIHLKKKAVVTEKYEDDRRKSFKKIGSFSLEQLQEYADADLSVVEKLKEIIIQKVDEIYKVYGSSEKLFDADFVLEKSLKKNDAVVAIMKDLLDSVKSFENYIKAFFGEGKETNRDESFYGDFVLAYDILLKVDHIYDAIRNYVTQKPYSKDKFKLYFQNPQFMGGWDKDKETDYRATILRYGSKYYLAIMDKKYAKCLQKIDKDDVNGNYEKINYKLLPGPNKMLPKVFFSKKWMAYYNPSEDIQKIYKNGTFKKGDMFNLNDCHKLIDFFKDSISRYPKWSNAYDFNFSETEKYKDIAGFYREVEEQGYKVSFESASKKEVDKLVEEGKLYMFQIYNKDFSDKSHGTPNLHTMYFKLLFDENNHGQIRLSGGAELFMRRASLKKEELVVHPANSPIANKNPDNPKKTTTLSYDVYKDKRFSEDQYELHIPIAINKCPKNIFKINTEVRVLLKHDDNPYVIGIARGERNLLYIVVVDGKGNIVEQYSLNEIINNFNGIRIKTDYHSLLDKKEKERFEARQNWTSIENIKELKAGYISQVVHKICELVEKYDAVIALEDLNSGFKNSRVKVEKQVYQKFEKMLIDKLNYMVDKKSNPCATGGALKGYQITNKFESFKSMSTQNGFIFYIPAWLTSKIDPSTGFVNLLKTKYTSIADSKKFISSFDRIMYVPEEDLFEFALDYKNFSRTDADYIKKWKLYSYGNRIRIFRNPKKNNVFDWEEVCLTSAYKELFNKYGINYQQGDIRALLCEQSDKAFYSSFMALMSLMLQMRNSITGRTDVDFLISPVKNSDGIFYDSRNYEAQENAILPKNADANGAYNIARKVLWAIGQFKKAEDEKLDKVKIAISNKEWLEYAQTSVKH

SEQ ID NO: 435 - protein, 1335 aa, Synthetic construct
SKLEKFTNCYSLSKTLRFKAIPVGKTQENIDNKRLLVEDEKRAEDYKGVKKLLDRYYLSFINDVLHSIKLKNLNNYISLFRKKTRTEKENKELENLEINLRKEIAKAFKGNEGYKSLFKKDIIETILPEFLDDKDEIALVNSFNGFTTAFTGFFDNRENMFSEEAKSTSIAFRCINENLTRYISNMDIFEKVDAIFDKHEVQEIKEKILNSDYDVEDFFEGEFFNFVLTQEGIDVYNAIIGGFVTESGEKIKGLNEYINLYNQKTKQKLPKFKPLYKQVLSDRESLSFYGEGSSGDGNAHTVNPSKLVSHRLGDGLTVQQIDRACTPALWCALTREKDFDEKNGLPAREDRAIRVHGHEIKSSDYIQVFSKRKKTDSDRDETPFGAIAVRGGFVEIGPSGYTSDEEVLEVFRNTLNKNSEIFSSIKKLEKLFKNFDEYSSAGIFVKNGPAISTISKDIFGEWNVIRDKWNAEYDDIHLKKKAVVTEKYEDDRRKSFKKIGSFSLEQLQEYADADLSVVEKLKEIIIQKVDEIYKVYGSSEKLFDADFVLEKSLKKNDAVVAIMKDLLDSVKSFENYIKAFFGEGKETNRDESFYGDFVLAYDILLKVDHIYDAIRNYVTQKPYSKDKFKLYFQNPQFMGGWDKDKETDYRATILRYGSKYYLAIMDKKYAKCLQKIDKDDVNGNYEKINYKLLPGPNKMLPKVFFSKKWMAYYNPSEDIQKIYKNGTFKKGDMFNLNDCHKLIDFFKDSISRYPKWSNAYDFNFSETEKYKDIAGFYREVEEQGYKVSFESASKKEVDKLVEEGKLYMFQIYNKDFSDKSHGTPNLHTMYFKLLFDENNHGQIRLSGGAELFMRRASLKKEELVVHPANSPIANKNPDNPKKTTTLSYDVYKDKRFSEDQYELHIPIAINKCPKNIFKINTEVRVLLKHDDNPYVIGIARGERNLLYIVVVDGKGNIVEQYSLNEIINNFNGIRIKTDYHSLLDKKEKERFEARQNWTSIENIKELKAGYISQVVHKICELVEKYDAVIALEDLNSGFKNSRVKVEKQVYQKFEKMLIDKLNYMVDKKSNPCATGGALKGYQITNKFESFKSMSTQNGFIFYIPAWLTSKIDPSTGFVNLLKTKYTSIADSKKFISSFDRIMYVPEEDLFEFALDYKNFSRTDADYIKKWKLYSYGNRIRIFRNPKKNNVFDWEEVCLTSAYKELFNKYGINYQQGDIRALLCEQSDKAFYSSFMALMSLMLQMRNSITGRTDVDFLISPVKNSDGIFYDSRNYEAQENAILPKNADANGAYNIARKVLWAIGQFKKAEDEKLDKVKIAISNKEWLEYAQTSVKH

SEQ ID NO: 436 - protein, 1381 aa, Synthetic construct
SKLEKFTNCYSLSKTLRFKAIPVGKTQENIDNKRLLVEDEKRAEDYKGVKKLLDRYYLSFINDVLHSIKLKNLNNYISLFRKKTRTEKENKELENLEINLRKEIAKAFKGNEGYKSLFKKDIIETILPEFLDDKDEIALVNSFNGFTTAFTGFFDNRENMFSEEAKSTSIAFRCINENLTRYISNMDIFEKVDAIFDKHEVQEIKEKILNSDYDVEDFFEGEFFNFVLTQEGIDVYNAIIGGFVTESGEKIKGLNEYINLYNQKTKQKLPKFKPLYKQVLSDRESLSFYGEGSSGENQYTNQGKSNSQQRLKRLEKSLKELGSKILKENIPAKLSKIDNNALQNDRLYLYYLQNGKDMYTGDDLDIDRLSNYDIDHIIPQAFLKDNSIDNKVLVSSASNRGKSDDFPSLEVVKKRKTFWYQLLKSKLISQRKFDNLTKAERGGLLGYTSDEEVLEVFRNTLNKNSEIFSSIKKLEKLFKNFDEYSSAGIFVKNGPAISTISKDIFGEWNVIRDKWNAEYDDIHLKKKAVVTEKYEDDRRKSFKKIGSFSLEQLQEYADADLSVVEKLKEIIIQKVDEIYKVYGSSEKLFDADFVLEKSLKKNDAVVAIMKDLLDSVKSFENYIKAFFGEGKETNRDESFYGDFVLAYDILLKVDHIYDAIRNYVTQKPYSKDKFKLYFQNPQFMGGWDKDKETDYRATILRYGSKYYLAIMDKKYAKCLQKIDKDDVNGNYEKINYKLLPGPNKMLPKVFFSKKWMAYYNPSEDIQKIYKNGTFKKGDMFNLNDCHKLIDFFKDSISRYPKWSNAYDFNFSETEKYKDIAGFYREVEEQGYKVSFESASKKEVDKLVEEGKLYMFQIYNKDFSDKSHGTPNLHTMYFKLLFDENNHGQIRLSGGAELFMRRASLKKEELVVHPANSPIANKNPDNPKKTTTLSYDVYKDKRFSEDQYELHIPIAINKCPKNIFKINTEVRVLLKHDDNPYVIGIARGERNLLYIVVVDGKGNIVEQYSLNEIINNFNGIRIKTDYHSLLDKKEKERFEARQNWTSIENIKELKAGYISQVVHKICELVEKYDAVIALEDLNSGFKNSRVKVEKQVYQKFEKMLIDKLNYMVDKKSNPCATGGALKGYQITNKFESFKSMSTQNGFIFYIPAWLTSKIDPSTGFVNLLKTKYTSIADSKKFISSFDRIMYVPEEDLFEFALDYKNFSRTDADYIKKWKLYSYGNRIRIFRNPKKNNVFDWEEVCLTSAYKELFNKYGINYQQGDIRALLCEQSDKAFYSSFMALMSLMLQMRNSITGRTDVDFLISPVKNSDGIFYDSRNYEAQENAILPKNADANGAYNIARKVLWAIGQFKKAEDEKLDKVKIAISNKEWLEYAQTSVKH

SEQ ID NO: 437 - protein, 1347 aa, Synthetic construct
SKLEKFTNCYSLSKTLRFKAIPVGKTQENIDNKRLLVEDEKRAEDYKGVKKLLDRYYLSFINDVLHSIKLKNLNNYISLFRKKTRTEKENKELENLEINLRKEIAKAFKGNEGYKSLFKKDIIETILPEFLDDKDEIALVNSFNGFTTAFTGFFDNRENMFSEEAKSTSIAFRCINENLTRYISNMDIFEKVDAIFDKHEVQEIKEKILNSDYDVEDFFEGEFFNFVLTQEGIDVYNAIIGGFVTESGEKIKGLNEYINLYNQKTKQKLPKFKPLYKQVLSDRESLSFYGEGSSGFPNFVGEPKSKDILKLRLYEQQHGKCLYSGKEINLGRLNEKGYVEIDHALPFSRTWDDSFNNKVLVLGSENQNKGNQTPYEYFNGKDNSREWQEFKARVETSRFPRSKKQRILLQKGYTSDEEVLEVFRNTLNKNSEIFSSIKKLEKLFKNFDEYSSAGIFVKNGPAISTISKDIFGEWNVIRDKWNAEYDDIHLKKKAVVTEKYEDDRRKSFKKIGSFSLEQLQEYADADLSVVEKLKEIIIQKVDEIYKVYGSSEKLFDADFVLEKSLKKNDAVVAIMKDLLDSVKSFENYIKAFFGEGKETNRDESFYGDFVLAYDILLKVDHIYDAIRNYVTQKPYSKDKFKLYFQNPQFMGGWDKDKETDYRATILRYGSKYYLAIMDKKYAKCLQKIDKDDVNGNYEKINYKLLPGPNKMLPKVFFSKKWMAYYNPSEDIQKIYKNGTFKKGDMFNLNDCHKLIDFFKDSISRYPKWSNAYDFNFSETEKYKDIAGFYREVEEQGYKVSFESASKKEVDKLVEEGKLYMFQIYNKDFSDKSHGTPNLHTMYFKLLFDENNHGQIRLSGGAELFMRRASLKKEELVVHPANSPIANKNPDNPKKTTTLSYDVYKDKRFSEDQYELHIPIAINKCPKNIFKINTEVRVLLKHDDNPYVIGIARGERNLLYIVVVDGKGNIVEQYSLNEIINNFNGIRIKTDYHSLLDKKEKERFEARQNWTSIENIKELKAGYISQVVHKICELVEKYDAVIALEDLNSGFKNSRVKVEKQVYQKFEKMLIDKLNYMVDKKSNPCATGGALKGYQITNKFESFKSMSTQNGFIFYIPAWLTSKIDPSTGFVNLLKTKYTSIADSKKFISSFDRIMYVPEEDLFEFALDYKNFSRTDADYIKKWKLYSYGNRIRIFRNPKKNNVFDWEEVCLTSAYKELFNKYGINYQQGDIRALLCEQSDKAFYSSFMALMSLMLQMRNSITGRTDVDFLISPVKNSDGIFYDSRNYEAQENAILPKNADANGAYNIARKVLWAIGQFKKAEDEKLDKVKIAISNKEWLEYAQTSVKH

SEQ ID NO: 438 - protein, 1390 aa, Synthetic construct
SKLEKFTNCYSLSKTLRFKAIPVGKTQENIDNKRLLVEDEKRAEDYKGVKKLLDRYYLSFINDVLHSIKLKNLNNYISLFRKKTRTEKENKELENLEINLRKEIAKAFKGNEGYKSLFKKDIIETILPEFLDDKDEIALVNSFNGFTTAFTGFFDNRENMFSEEAKSTSIAFRCINENLTRYISNMDIFEKVDAIFDKHEVQEIKEKILNSDYDVEDFFEGEFFNFVLTQEGIDVYNAIIGGFVTESGEKIKGLNEYINLYNQKTKQKLPKFKPLYKQVLSDRESLSFYGEGSSGSPENIFKDKNNRIKEFAKGISAYSGANLTDGDFDGAKEELDHIIPRSHKKYGTLNDEANLICVTRGDNKNKGNRIFCLRDLADNYKLKQFETTDDLEIEKKIADTIWDANKKDFKFGNYRSFINLTPQEQKAFRHALFLADENPIKQAVIRAINNRNRTGYTSDEEVLEVFRNTLNKNSEIFSSIKKLEKLFKNFDEYSSAGIFVKNGPAISTISKDIFGEWNVIRDKWNAEYDDIHLKKKAVVTEKYEDDRRKSFKKIGSFSLEQLQEYADADLSVVEKLKEIIIQKVDEIYKVYGSSEKLFDADFVLEKSLKKNDAVVAIMKDLLDSVKSFENYIKAFFGEGKETNRDESFYGDFVLAYDILLKVDHIYDAIRNYVTQKPYSKDKFKLYFQNPQFMGGWDKDKETDYRATILRYGSKYYLAIMDKKYAKCLQKIDKDDVNGNYEKINYKLLPGPNKMLPKVFFSKKWMAYYNPSEDIQKIYKNGTFKKGDMFNLNDCHKLIDFFKDSISRYPKWSNAYDFNFSETEKYKDIAGFYREVEEQGYKVSFESASKKEVDKLVEEGKLYMFQIYNKDFSDKSHGTPNLHTMYFKLLFDENNHGQIRLSGGAELFMRRASLKKEELVVHPANSPIANKNPDNPKKTTTLSYDVYKDKRFSEDQYELHIPIAINKCPKNIFKINTEVRVLLKHDDNPYVIGIARGERNLLYIVVVDGKGNIVEQYSLNEIINNFNGIRIKTDYHSLLDKKEKERFEARQNWTSIENIKELKAGYISQVVHKICELVEKYDAVIALEDLNSGFKNSRVKVEKQVYQKFEKMLIDKLNYMVDKKSNPCATGGALKGYQITNKFESFKSMSTQNGFIFYIPAWLTSKIDPSTGFVNLLKTKYTSIADSKKFISSFDRIMYVPEEDLFEFALDYKNFSRTDADYIKKWKLYSYGNRIRIFRNPKKNNVFDWEEVCLTSAYKELFNKYGINYQQGDIRALLCEQSDKAFYSSFMALMSLMLQMRNSITGRTDVDFLISPVKNSDGIFYDSRNYEAQENAILPKNADANGAYNIARKVLWAIGQFKKAEDEKLDKVKIAISNKEWLEYAQTSVKH

SEQ ID NO: 439 - protein, 1337 aa, Synthetic construct
SKLEKFTNCYSLSKTLRFKAIPVGKTQENIDNKRLLVEDEKRAEDYKGVKKLLDRYYLSFINDVLHSIKLKNLNNYISLFRKKTRTEKENKELENLEINLRKEIAKAFKGNEGYKSLFKKDIIETILPEFLDDKDEIALVNSFNGFTTAFTGFFDNRENMFSEEAKSTSIAFRCINENLTRYISNMDIFEKVDAIFDKHEVQEIKEKILNSDYDVEDFFEGEFFNFVLTQEGIDVYNAIIGGFVTESGEKIKGLNEYINLYNQKTKQKLPKFKPLYKQVLSDRESLSFYGEGSSGHKHRCQVCGIVIEVDVGPYSQGAHIRPLGRKHGGPDVESNMLCLCPNDHVRFDNGALYITDDLKVVNALNGEVIGPLRVHPRHVIDLDHIRYHRSQLPNIPLEGSSGYTSDEEVLEVFRNTLNKNSEIFSSIKKLEKLFKNFDEYSSAGIFVKNGPAISTISKDIFGEWNVIRDKWNAEYDDIHLKKKAVVTEKYEDDRRKSFKKIGSFSLEQLQEYADADLSVVEKLKEIIIQKVDEIYKVYGSSEKLFDADFVLEKSLKKNDAVVAIMKDLLDSVKSFENYIKAFFGEGKETNRDESFYGDFVLAYDILLKVDHIYDAIRNYVTQKPYSKDKFKLYFQNPQFMGGWDKDKETDYRATILRYGSKYYLAIMDKKYAKCLQKIDKDDVNGNYEKINYKLLPGPNKMLPKVFFSKKWMAYYNPSEDIQKIYKNGTFKKGDMFNLNDCHKLIDFFKDSISRYPKWSNAYDFNFSETEKYKDIAGFYREVEEQGYKVSFESASKKEVDKLVEEGKLYMFQIYNKDFSDKSHGTPNLHTMYFKLLFDENNHGQIRLSGGAELFMRRASLKKEELVVHPANSPIANKNPDNPKKTTTLSYDVYKDKRFSEDQYELHIPIAINKCPKNIFKINTEVRVLLKHDDNPYVIGIARGERNLLYIVVVDGKGNIVEQYSLNEIINNFNGIRIKTDYHSLLDKKEKERFEARQNWTSIENIKELKAGYISQVVHKICELVEKYDAVIALEDLNSGFKNSRVKVEKQVYQKFEKMLIDKLNYMVDKKSNPCATGGALKGYQITNKFESFKSMSTQNGFIFYIPAWLTSKIDPSTGFVNLLKTKYTSIADSKKFISSFDRIMYVPEEDLFEFALDYKNFSRTDADYIKKWKLYSYGNRIRIFRNPKKNNVFDWEEVCLTSAYKELFNKYGINYQQGDIRALLCEQSDKAFYSSFMALMSLMLQMRNSITGRTDVDFLISPVKNSDGIFYDSRNYEAQENAILPKNADANGAYNIARKVLWAIGQFKKAEDEKLDKVKIAISNKEWLEYAQTSVKH

SEQ ID NO: 440 - protein, 1393 aa, Synthetic construct
SKLEKFTNCYSLSKTLRFKAIPVGKTQENIDNKRLLVEDEKRAEDYKGVKKLLDRYYLSFINDVLHSIKLKNLNNYISLFRKKTRTEKENKELENLEINLRKEIAKAFKGNEGYKSLFKKDIIETILPEFLDDKDEIALVNSFNGFTTAFTGFFDNRENMFSEEAKSTSIAFRCINENLTRYISNMDIFEKVDAIFDKHEVQEIKEKILNSDYDVEDFFEGEFFNFVLTQEGIDVYNAIIGGFVTESGEKIKGLNEYINLYNQKTKQKLPKFKPLYKQVLSDRESLSFYGEGSSGSEAEEVIFGFADTTEITTTADAIECQISNDASIDETEKHQLVKSRRGQGIFRSRLEQVESRCRVTGVQLKNHLIASHIKPWAVSNNQERLDGHNGLLLAPHVDHLFDKGFISFEDNGEMIVSEKLNLDVLKAWSISQGNYGYFSKQQQEYMCYHRENVFKKLGYTSDEEVLEVFRNTLNKNSEIFSSIKKLEKLFKNFDEYSSAGIFVKNGPAISTISKDIFGEWNVIRDKWNAEYDDIHLKKKAVVTEKYEDDRRKSFKKIGSFSLEQLQEYADADLSVVEKLKEIIIQKVDEIYKVYGSSEKLFDADFVLEKSLKKNDAVVAIMKDLLDSVKSFENYIKAFFGEGKETNRDESFYGDFVLAYDILLKVDHIYDAIRNYVTQKPYSKDKFKLYFQNPQFMGGWDKDKETDYRATILRYGSKYYLAIMDKKYAKCLQKIDKDDVNGNYEKINYKLLPGPNKMLPKVFFSKKWMAYYNPSEDIQKIYKNGTFKKGDMFNLNDCHKLIDFFKDSISRYPKWSNAYDFNFSETEKYKDIAGFYREVEEQGYKVSFESASKKEVDKLVEEGKLYMFQIYNKDFSDKSHGTPNLHTMYFKLLFDENNHGQIRLSGGAELFMRRASLKKEELVVHPANSPIANKNPDNPKKTTTLSYDVYKDKRFSEDQYELHIPIAINKCPKNIFKINTEVRVLLKHDDNPYVIGIARGERNLLYIVVVDGKGNIVEQYSLNEIINNFNGIRIKTDYHSLLDKKEKERFEARQNWTSIENIKELKAGYISQVVHKICELVEKYDAVIALEDLNSGFKNSRVKVEKQVYQKFEKMLIDKLNYMVDKKSNPCATGGALKGYQITNKFESFKSMSTQNGFIFYIPAWLTSKIDPSTGFVNLLKTKYTSIADSKKFISSFDRIMYVPEEDLFEFALDYKNFSRTDADYIKKWKLYSYGNRIRIFRNPKKNNVFDWEEVCLTSAYKELFNKYGINYQQGDIRALLCEQSDKAFYSSFMALMSLMLQMRNSITGRTDVDFLISPVKNSDGIFYDSRNYEAQENAILPKNADANGAYNIARKVLWAIGQFKKAEDEKLDKVKIAISNKEWLEYAQTSVKH

SEQ ID NO: 441 - protein, 1356 aa, Synthetic construct
SKLEKFTNCYSLSKTLRFKAIPVGKTQENIDNKRLLVEDEKRAEDYKGVKKLLDRYYLSFINDVLHSIKLKNLNNYISLFRKKTRTEKENKELENLEINLRKEIAKAFKGNEGYKSLFKKDIIETILPEFLDDKDEIALVNSFNGFTTAFTGFFDNRENMFSEEAKSTSIAFRCINENLTRYISNMDIFEKVDAIFDKHEVQEIKEKILNSDYDVEDFFEGEFFNFVLTQEGIDVYNAIIGGFVTESGEKIKGLNEYINLYNQKTKQKLPKFKPLYKQVLSDRESLSFYGEGSSGDEPGVATGNGQPVTGNWLAGASQGDGVPIPSQIADQLRGKEFKSWRDFREQFWVAVANDPELVKYFRKTNAKGMRDGLSPFTPKAEQAGGRDKYEIHHVVQISQGGAVYDIDNLRVMTPKMHIQVGYTSDEEVLEVFRNTLNKNSEIFSSIKKLEKLFKNFDEYSSAGIFVKNGPAISTISKDIFGEWNVIRDKWNAEYDDIHLKKKAVVTEKYEDDRRKSFKKIGSFSLEQLQEYADADLSVVEKLKEIIIQKVDEIYKVYGSSEKLFDADFVLEKSLKKNDAVVAIMKDLLDSVKSFENYIKAFFGEGKETNRDESFYGDFVLAYDILLKVDHIYDAIRNYVTQKPYSKDKFKLYFQNPQFMGGWDKDKETDYRATILRYGSKYYLAIMDKKYAKCLQKIDKDDVNGNYEKINYKLLPGPNKMLPKVFFSKKWMAYYNPSEDIQKIYKNGTFKKGDMFNLNDCHKLIDFFKDSISRYPKWSNAYDFNFSETEKYKDIAGFYREVEEQGYKVSFESASKKEVDKLVEEGKLYMFQIYNKDFSDKSHGTPNLHTMYFKLLFDENNHGQIRLSGGAELFMRRASLKKEELVVHPANSPIANKNPDNPKKTTTLSYDVYKDKRFSEDQYELHIPIAINKCPKNIFKINTEVRVLLKHDDNPYVIGIARGERNLLYIVVVDGKGNIVEQYSLNEIINNFNGIRIKTDYHSLLDKKEKERFEARQNWTSIENIKELKAGYISQVVHKICELVEKYDAVIALEDLNSGFKNSRVKVEKQVYQKFEKMLIDKLNYMVDKKSNPCATGGALKGYQITNKFESFKSMSTQNGFIFYIPAWLTSKIDPSTGFVNLLKTKYTSIADSKKFISSFDRIMYVPEEDLFEFALDYKNFSRTDADYIKKWKLYSYGNRIRIFRNPKKNNVFDWEEVCLTSAYKELFNKYGINYQQGDIRALLCEQSDKAFYSSFMALMSLMLQMRNSITGRTDVDFLISPVKNSDGIFYDSRNYEAQENAILPKNADANGAYNIARKVLWAIGQFKKAEDEKLDKVKIAISNKEWLEYAQTSVKH

SEQ ID NO: 442 - protein, 1395 aa, Synthetic construct
MSKLEKFTNCYSLSKTLRFKAIPVGKTQENIDNKRLLVEDEKRAEDYKGVKKLLDRYYLSFINDVLHSIKLKNLNNYISLFRKKTRTEKENKELENLEINLRKEIAKAFKGNEGYKSLFKKDIIETILPEFLDDKDEIALVNSFNGFTTAFTGFFDNRENMFSEEAKSTSIAFRCINENLTRYISNMDIFEKVDAIFDKHEVQEIKEKILNSDYDVEDFFEGEFFNFVLTQEGIDVYNAIIGGFVTESGGSSGSPENIFKDKNNRIKEFAKGISAYSGANLTDGDFDGAKEELDHIIPRSHKKYGTLNDEANLICVTRGDNKNKGNRIFCLRDLADNYKLKQFETTDDLEIEKKIADTIWDANKKDFKFGNYRSFINLTPQEQKAFRHALFLADENPIKQAVIRAINNRNRTGSSGEKIKGLNEYINLYNQKTKQKLPKFKPLYKQVLSDRESLSFYGEGYTSDEEVLEVFRNTLNKNSEIFSSIKKLEKLFKNFDEYSSAGIFVKNGPAISTISKDIFGEWNVIRDKWNAEYDDIHLKKKAVVTEKYEDDRRKSFKKIGSFSLEQLQEYADADLSVVEKLKEIIIQKVDEIYKVYGSSEKLFDADFVLEKSLKKNDAVVAIMKDLLDSVKSFENYIKAFFGEGKETNRDESFYGDFVLAYDILLKVDHIYDAIRNYVTQKPYSKDKFKLYFQNPQFMGGWDKDKETDYRATILRYGSKYYLAIMDKKYAKCLQKIDKDDVNGNYEKINYKLLPGPNKMLPKVFFSKKWMAYYNPSEDIQKIYKNGTFKKGDMFNLNDCHKLIDFFKDSISRYPKWSNAYDFNFSETEKYKDIAGFYREVEEQGYKVSFESASKKEVDKLVEEGKLYMFQIYNKDFSDKSHGTPNLHTMYFKLLFDENNHGQIRLSGGAELFMRRASLKKEELVVHPANSPIANKNPDNPKKTTTLSYDVYKDKRFSEDQYELHIPIAINKCPKNIFKINTEVRVLLKHDDNPYVIGIARGERNLLYIVVVDGKGNIVEQYSLNEIINNFNGIRIKTDYHSLLDKKEKERFEARQNWTSIENIKELKAGYISQVVHKICELVEKYDAVIALEDLNSGFKNSRVKVEKQVYQKFEKMLIDKLNYMVDKKSNPCATGGALKGYQITNKFESFKSMSTQNGFIFYIPAWLTSKIDPSTGFVNLLKTKYTSIADSKKFISSFDRIMYVPEEDLFEFALDYKNFSRTDADYIKKWKLYSYGNRIRIFRNPKKNNVFDWEEVCLTSAYKELFNKYGINYQQGDIRALLCEQSDKAFYSSFMALMSLMLQMRNSITGRTDVDFLISPVKNSDGIFYDSRNYEAQENAILPKNADANGAYNIARKVLWAIGQFKKAEDEKLDKVKIAISNKEWLEYAQTSVKH

SEQ ID NO: 443 - protein, 1361 aa, Synthetic construct
MSKLEKFTNCYSLSKTLRFKAIPVGKTQENIDNKRLLVEDEKRAEDYKGVKKLLDRYYLSFINDVLHSIKLKNLNNYISLFRKKTRTEKENKELENLEINLRKEIAKAFKGNEGYKSLFKKDIIETILPEFLDDKDEIALVNSFNGFTTAFTGFFDNRENMFSEEAKSTSIAFRCINENLTRYISNMDIFEKVDAIFDKHEVQEIKEKILNSDYDVEDFFEGEFFNFVLTQEGIDVYNAIIGGFVTESGGSSGDEPGVATGNGQPVTGNWLAGASQGDGVPIPSQIADQLRGKEFKSWRDFREQFWVAVANDPELVKYFRKTNAKGMRDGLSPFTPKAEQAGGRDKYEIHHVVQISQGGAVYDIDNLRVMTPKMHIQVGSSGEKIKGLNEYINLYNQKTKQKLPKFKPLYKQVLSDRESLSFYGEGYTSDEEVLEVFRNTLNKNSEIFSSIKKLEKLFKNFDEYSSAGIFVKNGPAISTISKDIFGEWNVIRDKWNAEYDDIHLKKKAVVTEKYEDDRRKSFKKIGSFSLEQLQEYADADLSVVEKLKEIIIQKVDEIYKVYGSSEKLFDADFVLEKSLKKNDAVVAIMKDLLDSVKSFENYIKAFFGEGKETNRDESFYGDFVLAYDILLKVDHIYDAIRNYVTQKPYSKDKFKLYFQNPQFMGGWDKDKETDYRATILRYGSKYYLAIMDKKYAKCLQKIDKDDVNGNYEKINYKLLPGPNKMLPKVFFSKKWMAYYNPSEDIQKIYKNGTFKKGDMFNLNDCHKLIDFFKDSISRYPKWSNAYDFNFSETEKYKDIAGFYREVEEQGYKVSFESASKKEVDKLVEEGKLYMFQIYNKDFSDKSHGTPNLHTMYFKLLFDENNHGQIRLSGGAELFMRRASLKKEELVVHPANSPIANKNPDNPKKTTTLSYDVYKDKRFSEDQYELHIPIAINKCPKNIFKINTEVRVLLKHDDNPYVIGIARGERNLLYIVVVDGKGNIVEQYSLNEIINNFNGIRIKTDYHSLLDKKEKERFEARQNWTSIENIKELKAGYISQVVHKICELVEKYDAVIALEDLNSGFKNSRVKVEKQVYQKFEKMLIDKLNYMVDKKSNPCATGGALKGYQITNKFESFKSMSTQNGFIFYIPAWLTSKIDPSTGFVNLLKTKYTSIADSKKFISSFDRIMYVPEEDLFEFALDYKNFSRTDADYIKKWKLYSYGNRIRIFRNPKKNNVFDWEEVCLTSAYKELFNKYGINYQQGDIRALLCEQSDKAFYSSFMALMSLMLQMRNSITGRTDVDFLISPVKNSDGIFYDSRNYEAQENAILPKNADANGAYNIARKVLWAIGQFKKAEDEKLDKVKIAISNKEWLEYAQTSVKH

SEQ ID NO: 444 - protein, 1342 aa, Synthetic construct
MSKLEKFTNCYSLSKTLRFKAIPVGKTQENIDNKRLLVEDEKRAEDYKGVKKLLDRYYLSFINDVLHSIKLKNLNNYISLFRKKTRTEKENKELENLEINLRKEIAKAFKGNEGYKSLFKKDIIETILPEFLDDKDEIALVNSFNGFTTAFTGFFDNRENMFSEEAKSTSIAFRCINENLTRYISNMDIFEKVDAIFDKHEVQEIKEKILNSDYDVEDFFEGEFFNFVLTQEGIDVYNAIIGGFVTESGGSSGHKHRCQVCGIVIEVDVGPYSQGAHIRPLGRKHGGPDVESNMLCLCPNDHVRFDNGALYITDDLKVVNALNGEVIGPLRVHPRHVIDLDHIRYHRSQLPNIPLEGSSGSSGEKIKGLNEYINLYNQKTKQKLPKFKPLYKQVLSDRESLSFYGEGYTSDEEVLEVFRNTLNKNSEIFSSIKKLEKLFKNFDEYSSAGIFVKNGPAISTISKDIFGEWNVIRDKWNAEYDDIHLKKKAVVTEKYEDDRRKSFKKIGSFSLEQLQEYADADLSVVEKLKEIIIQKVDEIYKVYGSSEKLFDADFVLEKSLKKNDAVVAIMKDLLDSVKSFENYIKAFFGEGKETNRDESFYGDFVLAYDILLKVDHIYDAIRNYVTQKPYSKDKFKLYFQNPQFMGGWDKDKETDYRATILRYGSKYYLAIMDKKYAKCLQKIDKDDVNGNYEKINYKLLPGPNKMLPKVFFSKKWMAYYNPSEDIQKIYKNGTFKKGDMFNLNDCHKLIDFFKDSISRYPKWSNAYDFNFSETEKYKDIAGFYREVEEQGYKVSFESASKKEVDKLVEEGKLYMFQIYNKDFSDKSHGTPNLHTMYFKLLFDENNHGQIRLSGGAELFMRRASLKKEELVVHPANSPIANKNPDNPKKTTTLSYDVYKDKRFSEDQYELHIPIAINKCPKNIFKINTEVRVLLKHDDNPYVIGIARGERNLLYIVVVDGKGNIVEQYSLNEIINNFNGIRIKTDYHSLLDKKEKERFEARQNWTSIENIKELKAGYISQVVHKICELVEKYDAVIALEDLNSGFKNSRVKVEKQVYQKFEKMLIDKLNYMVDKKSNPCATGGALKGYQITNKFESFKSMSTQNGFIFYIPAWLTSKIDPSTGFVNLLKTKYTSIADSKKFISSFDRIMYVPEEDLFEFALDYKNFSRTDADYIKKWKLYSYGNRIRIFRNPKKNNVFDWEEVCLTSAYKELFNKYGINYQQGDIRALLCEQSDKAFYSSFMALMSLMLQMRNSITGRTDVDFLISPVKNSDGIFYDSRNYEAQENAILPKNADANGAYNIARKVLWAIGQFKKAEDEKLDKVKIAISNKEWLEYAQTSVKH

SEQ ID NO: 445 - protein, 1398 aa, Synthetic construct
MSKLEKFTNCYSLSKTLRFKAIPVGKTQENIDNKRLLVEDEKRAEDYKGVKKLLDRYYLSFINDVLHSIKLKNLNNYISLFRKKTRTEKENKELENLEINLRKEIAKAFKGNEGYKSLFKKDIIETILPEFLDDKDEIALVNSFNGFTTAFTGFFDNRENMFSEEAKSTSIAFRCINENLTRYISNMDIFEKVDAIFDKHEVQEIKEKILNSDYDVEDFFEGEFFNFVLTQEGIDVYNAIIGGFVTESGGSSGSEAEEVIFGFADTTEITTTADAIECQISNDASIDETEKHQLVKSRRGQGIFRSRLEQVESRCRVTGVQLKNHLIASHIKPWAVSNNQERLDGHNGLLLAPHVDHLFDKGFISFEDNGEMIVSEKLNLDVLKAWSISQGNYGYFSKQQQEYMCYHRENVFKKLGSSGEKIKGLNEYINLYNQKTKQKLPKFKPLYKQVLSDRESLSFYGEGYTSDEEVLEVFRNTLNKNSEIFSSIKKLEKLFKNFDEYSSAGIFVKNGPAISTISKDIFGEWNVIRDKWNAEYDDIHLKKKAVVTEKYEDDRRKSFKKIGSFSLEQLQEYADADLSVVEKLKEIIIQKVDEIYKVYGSSEKLFDADFVLEKSLKKNDAVVAIMKDLLDSVKSFENYIKAFFGEGKETNRDESFYGDFVLAYDILLKVDHIYDAIRNYVTQKPYSKDKFKLYFQNPQFMGGWDKDKETDYRATILRYGSKYYLAIMDKKYAKCLQKIDKDDVNGNYEKINYKLLPGPNKMLPKVFFSKKWMAYYNPSEDIQKIYKNGTFKKGDMFNLNDCHKLIDFFKDSISRYPKWSNAYDFNFSETEKYKDIAGFYREVEEQGYKVSFESASKKEVDKLVEEGKLYMFQIYNKDFSDKSHGTPNLHTMYFKLLFDENNHGQIRLSGGAELFMRRASLKKEELVVHPANSPIANKNPDNPKKTTTLSYDVYKDKRFSEDQYELHIPIAINKCPKNIFKINTEVRVLLKHDDNPYVIGIARGERNLLYIVVVDGKGNIVEQYSLNEIINNFNGIRIKTDYHSLLDKKEKERFEARQNWTSIENIKELKAGYISQVVHKICELVEKYDAVIALEDLNSGFKNSRVKVEKQVYQKFEKMLIDKLNYMVDKKSNPCATGGALKGYQITNKFESFKSMSTQNGFIFYIPAWLTSKIDPSTGFVNLLKTKYTSIADSKKFISSFDRIMYVPEEDLFEFALDYKNFSRTDADYIKKWKLYSYGNRIRIFRNPKKNNVFDWEEVCLTSAYKELFNKYGINYQQGDIRALLCEQSDKAFYSSFMALMSLMLQMRNSITGRTDVDFLISPVKNSDGIFYDSRNYEAQENAILPKNADANGAYNIARKVLWAIGQFKKAEDEKLDKVKIAISNKEWLEYAQTSVKH

SEQ ID NO: 446 - protein, 1352 aa, Synthetic construct
MSKLEKFTNCYSLSKTLRFKAIPVGKTQENIDNKRLLVEDEKRAEDYKGVKKLLDRYYLSFINDVLHSIKLKNLNNYISLFRKKTRTEKENKELENLEINLRKEIAKAFKGNEGYKSLFKKDIIETILPEFLDDKDEIALVNSFNGFTTAFTGFFDNRENMFSEEAKSTSIAFRCINENLTRYISNMDIFEKVDAIFDKHEVQEIKEKILNSDYDVEDFFEGEFFNFVLTQEGIDVYNAIIGGFVTESGGSSGFPNFVGEPKSKDILKLRLYEQQHGKCLYSGKEINLGRLNEKGYVEIDHALPFSRTWDDSFNNKVLVLGSENQNKGNQTPYEYFNGKDNSREWQEFKARVETSRFPRSKKQRILLQKGSSGEKIKGLNEYINLYNQKTKQKLPKFKPLYKQVLSDRESLSFYGEGYTSDEEVLEVFRNTLNKNSEIFSSIKKLEKLFKNFDEYSSAGIFVKNGPAISTISKDIFGEWNVIRDKWNAEYDDIHLKKKAVVTEKYEDDRRKSFKKIGSFSLEQLQEYADADLSVVEKLKEIIIQKVDEIYKVYGSSEKLFDADFVLEKSLKKNDAVVAIMKDLLDSVKSFENYIKAFFGEGKETNRDESFYGDFVLAYDILLKVDHIYDAIRNYVTQKPYSKDKFKLYFQNPQFMGGWDKDKETDYRATILRYGSKYYLAIMDKKYAKCLQKIDKDDVNGNYEKINYKLLPGPNKMLPKVFFSKKWMAYYNPSEDIQKIYKNGTFKKGDMFNLNDCHKLIDFFKDSISRYPKWSNAYDFNFSETEKYKDIAGFYREVEEQGYKVSFESASKKEVDKLVEEGKLYMFQIYNKDFSDKSHGTPNLHTMYFKLLFDENNHGQIRLSGGAELFMRRASLKKEELVVHPANSPIANKNPDNPKKTTTLSYDVYKDKRFSEDQYELHIPIAINKCPKNIFKINTEVRVLLKHDDNPYVIGIARGERNLLYIVVVDGKGNIVEQYSLNEIINNFNGIRIKTDYHSLLDKKEKERFEARQNWTSIENIKELKAGYISQVVHKICELVEKYDAVIALEDLNSGFKNSRVKVEKQVYQKFEKMLIDKLNYMVDKKSNPCATGGALKGYQITNKFESFKSMSTQNGFIFYIPAWLTSKIDPSTGFVNLLKTKYTSIADSKKFISSFDRIMYVPEEDLFEFALDYKNFSRTDADYIKKWKLYSYGNRIRIFRNPKKNNVFDWEEVCLTSAYKELFNKYGINYQQGDIRALLCEQSDKAFYSSFMALMSLMLQMRNSITGRTDVDFLISPVKNSDGIFYDSRNYEAQENAILPKNADANGAYNIARKVLWAIGQFKKAEDEKLDKVKIAISNKEWLEYAQTSVKH

SEQ ID NO: 447 - protein, 1386 aa, Synthetic construct
MSKLEKFTNCYSLSKTLRFKAIPVGKTQENIDNKRLLVEDEKRAEDYKGVKKLLDRYYLSFINDVLHSIKLKNLNNYISLFRKKTRTEKENKELENLEINLRKEIAKAFKGNEGYKSLFKKDIIETILPEFLDDKDEIALVNSFNGFTTAFTGFFDNRENMFSEEAKSTSIAFRCINENLTRYISNMDIFEKVDAIFDKHEVQEIKEKILNSDYDVEDFFEGEFFNFVLTQEGIDVYNAIIGGFVTESGGSSGENQYTNQGKSNSQQRLKRLEKSLKELGSKILKENIPAKLSKIDNNALQNDRLYLYYLQNGKDMYTGDDLDIDRLSNYDIDHIIPQAFLKDNSIDNKVLVSSASNRGKSDDFPSLEVVKKRKTFWYQLLKSKLISQRKFDNLTKAERGGLLGSSGEKIKGLNEYINLYNQKTKQKLPKFKPLYKQVLSDRESLSFYGEGYTSDEEVLEVFRNTLNKNSEIFSSIKKLEKLFKNFDEYSSAGIFVKNGPAISTISKDIFGEWNVIRDKWNAEYDDIHLKKKAVVTEKYEDDRRKSFKKIGSFSLEQLQEYADADLSVVEKLKEIIIQKVDEIYKVYGSSEKLFDADFVLEKSLKKNDAVVAIMKDLLDSVKSFENYIKAFFGEGKETNRDESFYGDFVLAYDILLKVDHIYDAIRNYVTQKPYSKDKFKLYFQNPQFMGGWDKDKETDYRATILRYGSKYYLAIMDKKYAKCLQKIDKDDVNGNYEKINYKLLPGPNKMLPKVFFSKKWMAYYNPSEDIQKIYKNGTFKKGDMFNLNDCHKLIDFFKDSISRYPKWSNAYDFNFSETEKYKDIAGFYREVEEQGYKVSFESASKKEVDKLVEEGKLYMFQIYNKDFSDKSHGTPNLHTMYFKLLFDENNHGQIRLSGGAELFMRRASLKKEELVVHPANSPIANKNPDNPKKTTTLSYDVYKDKRFSEDQYELHIPIAINKCPKNIFKINTEVRVLLKHDDNPYVIGIARGERNLLYIVVVDGKGNIVEQYSLNEIINNFNGIRIKTDYHSLLDKKEKERFEARQNWTSIENIKELKAGYISQVVHKICELVEKYDAVIALEDLNSGFKNSRVKVEKQVYQKFEKMLIDKLNYMVDKKSNPCATGGALKGYQITNKFESFKSMSTQNGFIFYIPAWLTSKIDPSTGFVNLLKTKYTSIADSKKFISSFDRIMYVPEEDLFEFALDYKNFSRTDADYIKKWKLYSYGNRIRIFRNPKKNNVFDWEEVCLTSAYKELFNKYGINYQQGDIRALLCEQSDKAFYSSFMALMSLMLQMRNSITGRTDVDFLISPVKNSDGIFYDSRNYEAQENAILPKNADANGAYNIARKVLWAIGQFKKAEDEKLDKVKIAISNKEWLEYAQTSVKH

SEQ ID NO: 448 - protein, 1340 aa, Synthetic construct
MSKLEKFTNCYSLSKTLRFKAIPVGKTQENIDNKRLLVEDEKRAEDYKGVKKLLDRYYLSFINDVLHSIKLKNLNNYISLFRKKTRTEKENKELENLEINLRKEIAKAFKGNEGYKSLFKKDIIETILPEFLDDKDEIALVNSFNGFTTAFTGFFDNRENMFSEEAKSTSIAFRCINENLTRYISNMDIFEKVDAIFDKHEVQEIKEKILNSDYDVEDFFEGEFFNFVLTQEGIDVYNAIIGGFVTESGGSSGDGNAHTVNPSKLVSHRLGDGLTVQQIDRACTPALWCALTREKDFDEKNGLPAREDRAIRVHGHEIKSSDYIQVFSKRKKTDSDRDETPFGAIAVRGGFVEIGPSGSSGEKIKGLNEYINLYNQKTKQKLPKFKPLYKQVLSDRESLSFYGEGYTSDEEVLEVFRNTLNKNSEIFSSIKKLEKLFKNFDEYSSAGIFVKNGPAISTISKDIFGEWNVIRDKWNAEYDDIHLKKKAVVTEKYEDDRRKSFKKIGSFSLEQLQEYADADLSVVEKLKEIIIQKVDEIYKVYGSSEKLFDADFVLEKSLKKNDAVVAIMKDLLDSVKSFENYIKAFFGEGKETNRDESFYGDFVLAYDILLKVDHIYDAIRNYVTQKPYSKDKFKLYFQNPQFMGGWDKDKETDYRATILRYGSKYYLAIMDKKYAKCLQKIDKDDVNGNYEKINYKLLPGPNKMLPKVFFSKKWMAYYNPSEDIQKIYKNGTFKKGDMFNLNDCHKLIDFFKDSISRYPKWSNAYDFNFSETEKYKDIAGFYREVEEQGYKVSFESASKKEVDKLVEEGKLYMFQIYNKDFSDKSHGTPNLHTMYFKLLFDENNHGQIRLSGGAELFMRRASLKKEELVVHPANSPIANKNPDNPKKTTTLSYDVYKDKRFSEDQYELHIPIAINKCPKNIFKINTEVRVLLKHDDNPYVIGIARGERNLLYIVVVDGKGNIVEQYSLNEIINNFNGIRIKTDYHSLLDKKEKERFEARQNWTSIENIKELKAGYISQVVHKICELVEKYDAVIALEDLNSGFKNSRVKVEKQVYQKFEKMLIDKLNYMVDKKSNPCATGGALKGYQITNKFESFKSMSTQNGFIFYIPAWLTSKIDPSTGFVNLLKTKYTSIADSKKFISSFDRIMYVPEEDLFEFALDYKNFSRTDADYIKKWKLYSYGNRIRIFRNPKKNNVFDWEEVCLTSAYKELFNKYGINYQQGDIRALLCEQSDKAFYSSFMALMSLMLQMRNSITGRTDVDFLISPVKNSDGIFYDSRNYEAQENAILPKNADANGAYNIARKVLWAIGQFKKAEDEKLDKVKIAISNKEWLEYAQTSVKH

SEQ ID NO: 449 - protein, 1387 aa, Synthetic construct
MSKLEKFTNCYSLSKTLRFKAIPVGKTQENIDNKRLLVEDEKRAEDYKGVKKLLDRYYLSFINDVLHSIKLKNLNNYISLFRKKTRTEKENKELENLEINLRKEIAKAFKGNEGYKSLFKKDIIETILPEFLDDKDEIALVNSFNGFTTAFTGFFDNRENMFSEEAKSTSIAFRCINENLTRYISNMDIFEKVDAIFDKHEVQEIKEKILNSDYDVEDFFEGEFFNFVLTQEGIDVYNAIIGGFVTESGGSSGEKNSKDAQKMINEMQKRNRQTNERIEEIIRTTGKENAKYLIEKIKLHDMQEGKCLYSLEAIPLEDLLNNPFNYEVDHIIPRSVSFDNSFNNKVLVKQEENSKKGNRTPFQYLSSSDSKISYETFKKHILNLAKGKGRISKTKKEYLLEERDGSSGEKIKGLNEYINLYNQKTKQKLPKFKPLYKQVLSDRESLSFYGEGYTSDEEVLEVFRNTLNKNSEIFSSIKKLEKLFKNFDEYSSAGIFVKNGPAISTISKDIFGEWNVIRDKWNAEYDDIHLKKKAVVTEKYEDDRRKSFKKIGSFSLEQLQEYADADLSVVEKLKEIIIQKVDEIYKVYGSSEKLFDADFVLEKSLKKNDAVVAIMKDLLDSVKSFENYIKAFFGEGKETNRDESFYGDFVLAYDILLKVDHIYDAIRNYVTQKPYSKDKFKLYFQNPQFMGGWDKDKETDYRATILRYGSKYYLAIMDKKYAKCLQKIDKDDVNGNYEKINYKLLPGPNKMLPKVFFSKKWMAYYNPSEDIQKIYKNGTFKKGDMFNLNDCHKLIDFFKDSISRYPKWSNAYDFNFSETEKYKDIAGFYREVEEQGYKVSFESASKKEVDKLVEEGKLYMFQIYNKDFSDKSHGTPNLHTMYFKLLFDENNHGQIRLSGGAELFMRRASLKKEELVVHPANSPIANKNPDNPKKTTTLSYDVYKDKRFSEDQYELHIPIAINKCPKNIFKINTEVRVLLKHDDNPYVIGIARGERNLLYIVVVDGKGNIVEQYSLNEIINNFNGIRIKTDYHSLLDKKEKERFEARQNWTSIENIKELKAGYISQVVHKICELVEKYDAVIALEDLNSGFKNSRVKVEKQVYQKFEKMLIDKLNYMVDKKSNPCATGGALKGYQITNKFESFKSMSTQNGFIFYIPAWLTSKIDPSTGFVNLLKTKYTSIADSKKFISSFDRIMYVPEEDLFEFALDYKNFSRTDADYIKKWKLYSYGNRIRIFRNPKKNNVFDWEEVCLTSAYKELFNKYGINYQQGDIRALLCEQSDKAFYSSFMALMSLMLQMRNSITGRTDVDFLISPVKNSDGIFYDSRNYEAQENAILPKNADANGAYNIARKVLWAIGQFKKAEDEKLDKVKIAISNKEWLEYAQTSVKH

SEQ ID NO: 450 - protein, 1485 aa, Synthetic construct
MSKLEKFTNCYSLSKTLRFKAIPVGKTQENIDNKRLLVEDEKRAEDYKGVKKLLDRYYLSFINDVLHSIKLKNLNNYISLFRKKTRTEKENKELENLEINLRKEIAKAFKGNEGYKSLFKKDIIETILPEFLDDKDEIALVNSFNGFTTAFTGFFDNRENMFSEEAKSTSIAFRCINENLTRYISNMDIFEKVDAIFDKHEVQEIKEKILNSDYDVEDFFEGEFFNFVLTQEGIDVYNAIIGGFVTESGGSSGADLPALPGGPAGGTGELAKYGLPGVAQLRSRESYVLSYDPRTRGALWVLEQLRPERLRGDGDRSACDFREDDSVHAYHRATNADYRGSGFDRGHLAAAANHRWSQRAMDDTFYLSNVAPQVPHLNQNAWNNLERYSRSLTRTYQNVYVCTGPLFLPRTEADGKSYVKYQVIGKNHVAVPTHFFKVLILEAAGGQIELRSYVMPNAPVDETIPLERFLVPIESIERASGLLFVPNILARAGNLKAITAGSGSSGEKIKGLNEYINLYNQKTKQKLPKFKPLYKQVLSDRESLSFYGEGYTSDEEVLEVFRNTLNKNSEIFSSIKKLEKLFKNFDEYSSAGIFVKNGPAISTISKDIFGEWNVIRDKWNAEYDDIHLKKKAVVTEKYEDDRRKSFKKIGSFSLEQLQEYADADLSVVEKLKEIIIQKVDEIYKVYGSSEKLFDADFVLEKSLKKNDAVVAIMKDLLDSVKSFENYIKAFFGEGKETNRDESFYGDFVLAYDILLKVDHIYDAIRNYVTQKPYSKDKFKLYFQNPQFMGGWDKDKETDYRATILRYGSKYYLAIMDKKYAKCLQKIDKDDVNGNYEKINYKLLPGPNKMLPKVFFSKKWMAYYNPSEDIQKIYKNGTFKKGDMFNLNDCHKLIDFFKDSISRYPKWSNAYDFNFSETEKYKDIAGFYREVEEQGYKVSFESASKKEVDKLVEEGKLYMFQIYNKDFSDKSHGTPNLHTMYFKLLFDENNHGQIRLSGGAELFMRRASLKKEELVVHPANSPIANKNPDNPKKTTTLSYDVYKDKRFSEDQYELHIPIAINKCPKNIFKINTEVRVLLKHDDNPYVIGIARGERNLLYIVVVDGKGNIVEQYSLNEIINNFNGIRIKTDYHSLLDKKEKERFEARQNWTSIENIKELKAGYISQVVHKICELVEKYDAVIALEDLNSGFKNSRVKVEKQVYQKFEKMLIDKLNYMVDKKSNPCATGGALKGYQITNKFESFKSMSTQNGFIFYIPAWLTSKIDPSTGFVNLLKTKYTSIADSKKFISSFDRIMYVPEEDLFEFALDYKNFSRTDADYIKKWKLYSYGNRIRIFRNPKKNNVFDWEEVCLTSAYKELFNKYGINYQQGDIRALLCEQSDKAFYSSFMALMSLMLQMRNSITGRTDVDFLISPVKNSDGIFYDSRNYEAQENAILPKNADANGAYNIARKVLWAIGQFKKAEDEKLDKVKIAISNKEWLEYAQTSVKH

SEQ ID NO: 451 - protein, 1443 aa, Synthetic construct
MSKLEKFTNCYSLSKTLRFKAIPVGKTQENIDNKRLLVEDEKRAEDYKGVKKLLDRYYLSFINDVLHSIKLKNLNNYISLFRKKTRTEKENKELENLEINLRKEIAKAFKGNEGYKSLFKKDIIETILPEFLDDKDEIALVNSFNGFTTAFTGFFDNRENMFSEEAKSTSIAFRCINENLTRYISNMDIFEKVDAIFDKHEVQEIKEKILNSDYDVEDFFEGEFFNFVLTQEGIDVYNAIIGGFVTESGGSSGSFSHAKNEAVKIYRDHPVSFYCGCEIRWQGKKGIPDLESCGYQVRKNENRASRIEWEHVVPAWQFGHQLQCWQQGGRKNCTRTSPEFNQMEADLHNLTPAIGEVNGDRSNFSFSQWNGVDGVTYGQCEMQVNFKERTAMPPERARGAIARTYLYMSEQYGLRLSKAQSQLMQAWNNQYPVSEWECVRDQRIEKVQGNSNRFVREQCPGSSGEKIKGLNEYINLYNQKTKQKLPKFKPLYKQVLSDRESLSFYGEGYTSDEEVLEVFRNTLNKNSEIFSSIKKLEKLFKNFDEYSSAGIFVKNGPAISTISKDIFGEWNVIRDKWNAEYDDIHLKKKAVVTEKYEDDRRKSFKKIGSFSLEQLQEYADADLSVVEKLKEIIIQKVDEIYKVYGSSEKLFDADFVLEKSLKKNDAVVAIMKDLLDSVKSFENYIKAFFGEGKETNRDESFYGDFVLAYDILLKVDHIYDAIRNYVTQKPYSKDKFKLYFQNPQFMGGWDKDKETDYRATILRYGSKYYLAIMDKKYAKCLQKIDKDDVNGNYEKINYKLLPGPNKMLPKVFFSKKWMAYYNPSEDIQKIYKNGTFKKGDMFNLNDCHKLIDFFKDSISRYPKWSNAYDFNFSETEKYKDIAGFYREVEEQGYKVSFESASKKEVDKLVEEGKLYMFQIYNKDFSDKSHGTPNLHTMYFKLLFDENNHGQIRLSGGAELFMRRASLKKEELVVHPANSPIANKNPDNPKKTTTLSYDVYKDKRFSEDQYELHIPIAINKCPKNIFKINTEVRVLLKHDDNPYVIGIARGERNLLYIVVVDGKGNIVEQYSLNEIINNFNGIRIKTDYHSLLDKKEKERFEARQNWTSIENIKELKAGYISQVVHKICELVEKYDAVIALEDLNSGFKNSRVKVEKQVYQKFEKMLIDKLNYMVDKKSNPCATGGALKGYQITNKFESFKSMSTQNGFIFYIPAWLTSKIDPSTGFVNLLKTKYTSIADSKKFISSFDRIMYVPEEDLFEFALDYKNFSRTDADYIKKWKLYSYGNRIRIFRNPKKNNVFDWEEVCLTSAYKELFNKYGINYQQGDIRALLCEQSDKAFYSSFMALMSLMLQMRNSITGRTDVDFLISPVKNSDGIFYDSRNYEAQENAILPKNADANGAYNIARKVLWAIGQFKKAEDEKLDKVKIAISNKEWLEYAQTSVKH

SEQ ID NO: 452 - protein, 1333 aa, Synthetic construct
MSKLEKFTNCYSLSKTLRFKAIPVGKTQENIDNKRLLVEDEKRAEDYKGVKKLLDRYYLSFINDVLHSIKLKNLNNYISLFRKKTRTEKENKELENLEINLRKEIAKAFKGNEGYKSLFKKDIIETILPEFLDDKDEIALVNSFNGFTTAFTGFFDNRENMFSEEAKSTSIAFRCINENLTRYISNMDIFEKVDAIFDKHEVQEIKEKILNSDYDVEDFFEGEFFNFVLTQEGIDVYNAIIGGFVTESGGSSGMLLTGKLYKEEKQKFYDAQNGKCLICQRELNPDVQANHLDHDHELNGPKAGKVRGLLCNLCNAAEGQMKHKFNRSGLKGQGVDYLEWLENLLTYLKSGSSGEKIKGLNEYINLYNQKTKQKLPKFKPLYKQVLSDRESLSFYGEGYTSDEEVLEVFRNTLNKNSEIFSSIKKLEKLFKNFDEYSSAGIFVKNGPAISTISKDIFGEWNVIRDKWNAEYDDIHLKKKAVVTEKYEDDRRKSFKKIGSFSLEQLQEYADADLSVVEKLKEIIIQKVDEIYKVYGSSEKLFDADFVLEKSLKKNDAVVAIMKDLLDSVKSFENYIKAFFGEGKETNRDESFYGDFVLAYDILLKVDHIYDAIRNYVTQKPYSKDKFKLYFQNPQFMGGWDKDKETDYRATILRYGSKYYLAIMDKKYAKCLQKIDKDDVNGNYEKINYKLLPGPNKMLPKVFFSKKWMAYYNPSEDIQKIYKNGTFKKGDMFNLNDCHKLIDFFKDSISRYPKWSNAYDFNFSETEKYKDIAGFYREVEEQGYKVSFESASKKEVDKLVEEGKLYMFQIYNKDFSDKSHGTPNLHTMYFKLLFDENNHGQIRLSGGAELFMRRASLKKEELVVHPANSPIANKNPDNPKKTTTLSYDVYKDKRFSEDQYELHIPIAINKCPKNIFKINTEVRVLLKHDDNPYVIGIARGERNLLYIVVVDGKGNIVEQYSLNEIINNFNGIRIKTDYHSLLDKKEKERFEARQNWTSIENIKELKAGYISQVVHKICELVEKYDAVIALEDLNSGFKNSRVKVEKQVYQKFEKMLIDKLNYMVDKKSNPCATGGALKGYQITNKFESFKSMSTQNGFIFYIPAWLTSKIDPSTGFVNLLKTKYTSIADSKKFISSFDRIMYVPEEDLFEFALDYKNFSRTDADYIKKWKLYSYGNRIRIFRNPKKNNVFDWEEVCLTSAYKELFNKYGINYQQGDIRALLCEQSDKAFYSSFMALMSLMLQMRNSITGRTDVDFLISPVKNSDGIFYDSRNYEAQENAILPKNADANGAYNIARKVLWAIGQFKKAEDEKLDKVKIAISNKEWLEYAQTSVKH

SEQ ID NO: 453 - protein, 1322 aa, Synthetic construct
MSKLEKFTNCYSLSKTLRFKAIPVGKTQENIDNKRLLVEDEKRAEDYKGVKKLLDRYYLSFINDVLHSIKLKNLNNYISLFRKKTRTEKENKELENLEINLRKEIAKAFKGNEGYKSLFKKDIIETILPEFLDDKDEIALVNSFNGFTTAFTGFFDNRENMFSEEAKSTSIAFRCINENLTRYISNMDIFEKVDAIFDKHEVQEIKEKILNSDYDVEDFFEGEFFNFVLTQEGIDVYNAIIGGFVTESGGSSGMELKHSISDYTEAEFLQLVTTICNADTSSEEELVKLVTHFEEMTEHPSGSDLIYYPKEGDDDSPSGIVNTVKQWRAANGKSGFKQGGSSGEKIKGLNEYINLYNQKTKQKLPKFKPLYKQVLSDRESLSFYGEGYTSDEEVLEVFRNTLNKNSEIFSSIKKLEKLFKNFDEYSSAGIFVKNGPAISTISKDIFGEWNVIRDKWNAEYDDIHLKKKAVVTEKYEDDRRKSFKKIGSFSLEQLQEYADADLSVVEKLKEIIIQKVDEIYKVYGSSEKLFDADFVLEKSLKKNDAVVAIMKDLLDSVKSFENYIKAFFGEGKETNRDESFYGDFVLAYDILLKVDHIYDAIRNYVTQKPYSKDKFKLYFQNPQFMGGWDKDKETDYRATILRYGSKYYLAIMDKKYAKCLQKIDKDDVNGNYEKINYKLLPGPNKMLPKVFFSKKWMAYYNPSEDIQKIYKNGTFKKGDMFNLNDCHKLIDFFKDSISRYPKWSNAYDFNFSETEKYKDIAGFYREVEEQGYKVSFESASKKEVDKLVEEGKLYMFQIYNKDFSDKSHGTPNLHTMYFKLLFDENNHGQIRLSGGAELFMRRASLKKEELVVHPANSPIANKNPDNPKKTTTLSYDVYKDKRFSEDQYELHIPIAINKCPKNIFKINTEVRVLLKHDDNPYVIGIARGERNLLYIVVVDGKGNIVEQYSLNEIINNFNGIRIKTDYHSLLDKKEKERFEARQNWTSIENIKELKAGYISQVVHKICELVEKYDAVIALEDLNSGFKNSRVKVEKQVYQKFEKMLIDKLNYMVDKKSNPCATGGALKGYQITNKFESFKSMSTQNGFIFYIPAWLTSKIDPSTGFVNLLKTKYTSIADSKKFISSFDRIMYVPEEDLFEFALDYKNFSRTDADYIKKWKLYSYGNRIRIFRNPKKNNVFDWEEVCLTSAYKELFNKYGINYQQGDIRALLCEQSDKAFYSSFMALMSLMLQMRNSITGRTDVDFLISPVKNSDGIFYDSRNYEAQENAILPKNADANGAYNIARKVLWAIGQFKKAEDEKLDKVKIAISNKEWLEYAQTSVKH

SEQ ID NO: 454 - protein, 1503 aa, Synthetic construct
MSKLEKFTNCYSLSKTLRFKAIPVGKTQENIDNKRLLVEDEKRAEDYKGVKKLLDRYYLSFINDVLHSIKLKNLNNYISLFRKKTRTEKENKELENLEINLRKEIAKAFKGNEGYKSLFKKDIIETILPEFLDDKDEIALVNSFNGFTTAFTGFFDNRENMFSEEAKSTSIAFRCINENLTRYISNMDIFEKVDAIFDKHEVQEIKEKILNSDYDVEDFFEGEFFNFVLTQEGIDVYNAIIGGFVTESGGSSGWGNLGHETVAYIAQSFVASSTESFCQNILGDDSTSYLANVATWADTYKYTDAGEFSKPYHFIDAQDNPPQSCGVDYDRDCGSAGCSISAIQNYTNILLESPNGSEALNALKFVVHIIGDIHQPLHDENLEAGGNGIDVTYDGETTNLHHIWDTNMPEEAAGGYSLSVAKTYADLLTERIKTGTYSSKKDSWTDGIDIKDPVSTSMIWAADANTYVCSTVLDDGLAYINSTDLSGEYYDKSQPVFEELIAKAGYRLAAWLDLIASQPSGSSGEKIKGLNEYINLYNQKTKQKLPKFKPLYKQVLSDRESLSFYGEGYTSDEEVLEVFRNTLNKNSEIFSSIKKLEKLFKNFDEYSSAGIFVKNGPAISTISKDIFGEWNVIRDKWNAEYDDIHLKKKAVVTEKYEDDRRKSFKKIGSFSLEQLQEYADADLSVVEKLKEIIIQKVDEIYKVYGSSEKLFDADFVLEKSLKKNDAVVAIMKDLLDSVKSFENYIKAFFGEGKETNRDESFYGDFVLAYDILLKVDHIYDAIRNYVTQKPYSKDKFKLYFQNPQFMGGWDKDKETDYRATILRYGSKYYLAIMDKKYAKCLQKIDKDDVNGNYEKINYKLLPGPNKMLPKVFFSKKWMAYYNPSEDIQKIYKNGTFKKGDMFNLNDCHKLIDFFKDSISRYPKWSNAYDFNFSETEKYKDIAGFYREVEEQGYKVSFESASKKEVDKLVEEGKLYMFQIYNKDFSDKSHGTPNLHTMYFKLLFDENNHGQIRLSGGAELFMRRASLKKEELVVHPANSPIANKNPDNPKKTTTLSYDVYKDKRFSEDQYELHIPIAINKCPKNIFKINTEVRVLLKHDDNPYVIGIARGERNLLYIVVVDGKGNIVEQYSLNEIINNFNGIRIKTDYHSLLDKKEKERFEARQNWTSIENIKELKAGYISQVVHKICELVEKYDAVIALEDLNSGFKNSRVKVEKQVYQKFEKMLIDKLNYMVDKKSNPCATGGALKGYQITNKFESFKSMSTQNGFIFYIPAWLTSKIDPSTGFVNLLKTKYTSIADSKKFISSFDRIMYVPEEDLFEFALDYKNFSRTDADYIKKWKLYSYGNRIRIFRNPKKNNVFDWEEVCLTSAYKELFNKYGINYQQGDIRALLCEQSDKAFYSSFMALMSLMLQMRNSITGRTDVDFLISPVKNSDGIFYDSRNYEAQENAILPKNADANGAYNIARKVLWAIGQFKKAEDEKLDKVKIAISNKEWLEYAQTSVKH

SEQ ID NO: 455 - protein, 1506 aa, Synthetic construct
MSKLEKFTNCYSLSKTLRFKAIPVGKTQENIDNKRLLVEDEKRAEDYKGVKKLLDRYYLSFINDVLHSIKLKNLNNYISLFRKKTRTEKENKELENLEINLRKEIAKAFKGNEGYKSLFKKDIIETILPEFLDDKDEIALVNSFNGFTTAFTGFFDNRENMFSEEAKSTSIAFRCINENLTRYISNMDIFEKVDAIFDKHEVQEIKEKILNSDYDVEDFFEGEFFNFVLTQEGIDVYNAIIGGFVTESGGSSGWGALGHATVAYVAQHYVSPEAASWAQGILGSSSSSYLASIASWADEYRLTSAGKWSASLHFIDAEDNPPTNCNVDYERDCGSSGCSISAIANYTQRVSDSSLSSENHAEALRFLVHFIGDMTQPLHDEAYAVGGNKINVTFDGYHDNLHSDWDTYMPQKLIGGHALSDAESWAKTLVQNIESGNYTAQAIGWIKGDNISEPITTATRWASDANALVCTVVMPHGAAALQTGDLYPTYYDSVIDTIELQIAKGGYRLANWINEIHGSEIAKGSSGEKIKGLNEYINLYNQKTKQKLPKFKPLYKQVLSDRESLSFYGEGYTSDEEVLEVFRNTLNKNSEIFSSIKKLEKLFKNFDEYSSAGIFVKNGPAISTISKDIFGEWNVIRDKWNAEYDDIHLKKKAVVTEKYEDDRRKSFKKIGSFSLEQLQEYADADLSVVEKLKEIIIQKVDEIYKVYGSSEKLFDADFVLEKSLKKNDAVVAIMKDLLDSVKSFENYIKAFFGEGKETNRDESFYGDFVLAYDILLKVDHIYDAIRNYVTQKPYSKDKFKLYFQNPQFMGGWDKDKETDYRATILRYGSKYYLAIMDKKYAKCLQKIDKDDVNGNYEKINYKLLPGPNKMLPKVFFSKKWMAYYNPSEDIQKIYKNGTFKKGDMFNLNDCHKLIDFFKDSISRYPKWSNAYDFNFSETEKYKDIAGFYREVEEQGYKVSFESASKKEVDKLVEEGKLYMFQIYNKDFSDKSHGTPNLHTMYFKLLFDENNHGQIRLSGGAELFMRRASLKKEELVVHPANSPIANKNPDNPKKTTTLSYDVYKDKRFSEDQYELHIPIAINKCPKNIFKINTEVRVLLKHDDNPYVIGIARGERNLLYIVVVDGKGNIVEQYSLNEIINNFNGIRIKTDYHSLLDKKEKERFEARQNWTSIENIKELKAGYISQVVHKICELVEKYDAVIALEDLNSGFKNSRVKVEKQVYQKFEKMLIDKLNYMVDKKSNPCATGGALKGYQITNKFESFKSMSTQNGFIFYIPAWLTSKIDPSTGFVNLLKTKYTSIADSKKFISSFDRIMYVPEEDLFEFALDYKNFSRTDADYIKKWKLYSYGNRIRIFRNPKKNNVFDWEEVCLTSAYKELFNKYGINYQQGDIRALLCEQSDKAFYSSFMALMSLMLQMRNSITGRTDVDFLISPVKNSDGIFYDSRNYEAQENAILPKNADANGAYNIARKVLWAIGQFKKAEDEKLDKVKIAISNKEWLEYAQTSVKH

SEQ ID NO: 456 - protein, 1341 aa, Synthetic construct
MSKLEKFTNCYSLSKTLRFKAIPVGKTQENIDNKRLLVEDEKRAEDYKGVKKLLDRYYLSFINDVLHSIKLKNLNNYISLFRKKTRTEKENKELENLEINLRKEIAKAFKGNEGYKSLFKKDIIETILPEFLDDKDEIALVNSFNGFTTAFTGFFDNRENMFSEEAKSTSIAFRCINENLTRYISNMDIFEKVDAIFDKHEVQEIKEKILNSDYDVEDFFEGEFFNFVLTQEGIDVYNAIIGGFVTESGGSSGMEWKDIKGYEGHYQVSNTGEVYSIKSGKTLKHQIPKDGYHRIGLFKGGKGKTFQVHRLVAIHFCEGYEEGLVVDHKDGNKDNNLSTNLRWVTQKINVENQMSRGTGSSGEKIKGLNEYINLYNQKTKQKLPKFKPLYKQVLSDRESLSFYGEGYTSDEEVLEVFRNTLNKNSEIFSSIKKLEKLFKNFDEYSSAGIFVKNGPAISTISKDIFGEWNVIRDKWNAEYDDIHLKKKAVVTEKYEDDRRKSFKKIGSFSLEQLQEYADADLSVVEKLKEIIIQKVDEIYKVYGSSEKLFDADFVLEKSLKKNDAVVAIMKDLLDSVKSFENYIKAFFGEGKETNRDESFYGDFVLAYDILLKVDHIYDAIRNYVTQKPYSKDKFKLYFQNPQFMGGWDKDKETDYRATILRYGSKYYLAIMDKKYAKCLQKIDKDDVNGNYEKINYKLLPGPNKMLPKVFFSKKWMAYYNPSEDIQKIYKNGTFKKGDMFNLNDCHKLIDFFKDSISRYPKWSNAYDFNFSETEKYKDIAGFYREVEEQGYKVSFESASKKEVDKLVEEGKLYMFQIYNKDFSDKSHGTPNLHTMYFKLLFDENNHGQIRLSGGAELFMRRASLKKEELVVHPANSPIANKNPDNPKKTTTLSYDVYKDKRFSEDQYELHIPIAINKCPKNIFKINTEVRVLLKHDDNPYVIGIARGERNLLYIVVVDGKGNIVEQYSLNEIINNFNGIRIKTDYHSLLDKKEKERFEARQNWTSIENIKELKAGYISQVVHKICELVEKYDAVIALEDLNSGFKNSRVKVEKQVYQKFEKMLIDKLNYMVDKKSNPCATGGALKGYQITNKFESFKSMSTQNGFIFYIPAWLTSKIDPSTGFVNLLKTKYTSIADSKKFISSFDRIMYVPEEDLFEFALDYKNFSRTDADYIKKWKLYSYGNRIRIFRNPKKNNVFDWEEVCLTSAYKELFNKYGINYQQGDIRALLCEQSDKAFYSSFMALMSLMLQMRNSITGRTDVDFLISPVKNSDGIFYDSRNYEAQENAILPKNADANGAYNIARKVLWAIGQFKKAEDEKLDKVKIAISNKEWLEYAQTSVKH

SEQ ID NO: 457 - protein, 1346 aa, Synthetic construct
MSKLEKFTNCYSLSKTLRFKAIPVGKTQENIDNKRLLVEDEKRAEDYKGVKKLLDRYYLSFINDVLHSIKLKNLNNYISLFRKKTRTEKENKELENLEINLRKEIAKAFKGNEGYKSLFKKDIIETILPEFLDDKDEIALVNSFNGFTTAFTGFFDNRENMFSEEAKSTSIAFRCINENLTRYISNMDIFEKVDAIFDKHEVQEIKEKILNSDYDVEDFFEGEFFNFVLTQEGIDVYNAIIGGFVTESGGSSGGRTPTAEERRIANALGALPCIACYMHGVISNEVSLHHIAGRTAPGCHKKQLPLCRWHHQHAAPAEVREKYPWLVPVHADGVVGGKKEFTLLNKSEMELLADAYEMANIMHGSSGEKIKGLNEYINLYNQKTKQKLPKFKPLYKQVLSDRESLSFYGEGYTSDEEVLEVFRNTLNKNSEIFSSIKKLEKLFKNFDEYSSAGIFVKNGPAISTISKDIFGEWNVIRDKWNAEYDDIHLKKKAVVTEKYEDDRRKSFKKIGSFSLEQLQEYADADLSVVEKLKEIIIQKVDEIYKVYGSSEKLFDADFVLEKSLKKNDAVVAIMKDLLDSVKSFENYIKAFFGEGKETNRDESFYGDFVLAYDILLKVDHIYDAIRNYVTQKPYSKDKFKLYFQNPQFMGGWDKDKETDYRATILRYGSKYYLAIMDKKYAKCLQKIDKDDVNGNYEKINYKLLPGPNKMLPKVFFSKKWMAYYNPSEDIQKIYKNGTFKKGDMFNLNDCHKLIDFFKDSISRYPKWSNAYDFNFSETEKYKDIAGFYREVEEQGYKVSFESASKKEVDKLVEEGKLYMFQIYNKDFSDKSHGTPNLHTMYFKLLFDENNHGQIRLSGGAELFMRRASLKKEELVVHPANSPIANKNPDNPKKTTTLSYDVYKDKRFSEDQYELHIPIAINKCPKNIFKINTEVRVLLKHDDNPYVIGIARGERNLLYIVVVDGKGNIVEQYSLNEIINNFNGIRIKTDYHSLLDKKEKERFEARQNWTSIENIKELKAGYISQVVHKICELVEKYDAVIALEDLNSGFKNSRVKVEKQVYQKFEKMLIDKLNYMVDKKSNPCATGGALKGYQITNKFESFKSMSTQNGFIFYIPAWLTSKIDPSTGFVNLLKTKYTSIADSKKFISSFDRIMYVPEEDLFEFALDYKNFSRTDADYIKKWKLYSYGNRIRIFRNPKKNNVFDWEEVCLTSAYKELFNKYGINYQQGDIRALLCEQSDKAFYSSFMALMSLMLQMRNSITGRTDVDFLISPVKNSDGIFYDSRNYEAQENAILPKNADANGAYNIARKVLWAIGQFKKAEDEKLDKVKIAISNKEWLEYAQTSVKH

SEQ ID NO: 458 - protein, 1513 aa, Synthetic construct
MSKLEKFTNCYSLSKTLRFKAIPVGKTQENIDNKRLLVEDEKRAEDYKGVKKLLDRYYLSFINDVLHSIKLKNLNNYISLFRKKTRTEKENKELENLEINLRKEIAKAFKGNEGYKSLFKKDIIETILPEFLDDKDEIALVNSFNGFTTAFTGFFDNRENMFSEEAKSTSIAFRCINENLTRYISNMDIFEKVDAIFDKHEVQEIKEKILNSDYDVEDFFEGEFFNFVLTQEGIDVYNAIIGGFVTESGGSSGWSKEGHVMTCRIAQGLLNDEAAHAVKMLLPEYVNGDLSALCVWPDQVRHWYKYKWTSPLHFIDTPDKACNFDYERDCHDQHGVKDMCVAGAIQNFTTQLSHYREGTSDRRYNMTEALLFLSHFMGDIHQPMHVGFTSDAGGNSIDLRWFRHKSNLHHVWDREIILTAAKDYYAKDINLLEEDIEGNFTDGIWSDDLASWRECGNVFSCVNKFATESINIACKWGYKGVEAGETLSDDYFNSRLPIVMKRVAQGGIRLAMLLNNVFGASQQEDSVVATGSSGEKIKGLNEYINLYNQKTKQKLPKFKPLYKQVLSDRESLSFYGEGYTSDEEVLEVFRNTLNKNSEIFSSIKKLEKLFKNFDEYSSAGIFVKNGPAISTISKDIFGEWNVIRDKWNAEYDDIHLKKKAVVTEKYEDDRRKSFKKIGSFSLEQLQEYADADLSVVEKLKEIIIQKVDEIYKVYGSSEKLFDADFVLEKSLKKNDAVVAIMKDLLDSVKSFENYIKAFFGEGKETNRDESFYGDFVLAYDILLKVDHIYDAIRNYVTQKPYSKDKFKLYFQNPQFMGGWDKDKETDYRATILRYGSKYYLAIMDKKYAKCLQKIDKDDVNGNYEKINYKLLPGPNKMLPKVFFSKKWMAYYNPSEDIQKIYKNGTFKKGDMFNLNDCHKLIDFFKDSISRYPKWSNAYDFNFSETEKYKDIAGFYREVEEQGYKVSFESASKKEVDKLVEEGKLYMFQIYNKDFSDKSHGTPNLHTMYFKLLFDENNHGQIRLSGGAELFMRRASLKKEELVVHPANSPIANKNPDNPKKTTTLSYDVYKDKRFSEDQYELHIPIAINKCPKNIFKINTEVRVLLKHDDNPYVIGIARGERNLLYIVVVDGKGNIVEQYSLNEIINNFNGIRIKTDYHSLLDKKEKERFEARQNWTSIENIKELKAGYISQVVHKICELVEKYDAVIALEDLNSGFKNSRVKVEKQVYQKFEKMLIDKLNYMVDKKSNPCATGGALKGYQITNKFESFKSMSTQNGFIFYIPAWLTSKIDPSTGFVNLLKTKYTSIADSKKFISSFDRIMYVPEEDLFEFALDYKNFSRTDADYIKKWKLYSYGNRIRIFRNPKKNNVFDWEEVCLTSAYKELFNKYGINYQQGDIRALLCEQSDKAFYSSFMALMSLMLQMRNSITGRTDVDFLISPVKNSDGIFYDSRNYEAQENAILPKNADANGAYNIARKVLWAIGQFKKAEDEKLDKVKIAISNKEWLEYAQTSVKH

SEQ ID NO: 459 - protein, 1446 aa, Synthetic construct
MSKLEKFTNCYSLSKTLRFKAIPVGKTQENIDNKRLLVEDEKRAEDYKGVKKLLDRYYLSFINDVLHSIKLKNLNNYISLFRKKTRTEKENKELENLEINLRKEIAKAFKGNEGYKSLFKKDIIETILPEFLDDKDEIALVNSFNGFTTAFTGFFDNRENMFSEEAKSTSIAFRCINENLTRYISNMDIFEKVDAIFDKHEVQEIKEKILNSDYDVEDFFEGEFFNFVLTQEGIDVYNAIIGGFVTESGGSSGPPSSFSKAKKEAVKIYLDYPTSFYCGCDITWKNKKKGIPELESCGYQVRKQEKRASRIEWEHVVPAWQFGHQRQCWQKGGRKNCTRNDKQFKSMEADLHNLVPAIGEVNGDRSNFRFSQWNGSKGAFYGQCAFKVDFKGRVAEPPAQSRGAIARTYLYMNNEYKFNLSKAQRQLMEAWNKQYPVSTWECTRDERIAKIQGNHNQFVYKACGSSGEKIKGLNEYINLYNQKTKQKLPKFKPLYKQVLSDRESLSFYGEGYTSDEEVLEVFRNTLNKNSEIFSSIKKLEKLFKNFDEYSSAGIFVKNGPAISTISKDIFGEWNVIRDKWNAEYDDIHLKKKAVVTEKYEDDRRKSFKKIGSFSLEQLQEYADADLSVVEKLKEIIIQKVDEIYKVYGSSEKLFDADFVLEKSLKKNDAVVAIMKDLLDSVKSFENYIKAFFGEGKETNRDESFYGDFVLAYDILLKVDHIYDAIRNYVTQKPYSKDKFKLYFQNPQFMGGWDKDKETDYRATILRYGSKYYLAIMDKKYAKCLQKIDKDDVNGNYEKINYKLLPGPNKMLPKVFFSKKWMAYYNPSEDIQKIYKNGTFKKGDMFNLNDCHKLIDFFKDSISRYPKWSNAYDFNFSETEKYKDIAGFYREVEEQGYKVSFESASKKEVDKLVEEGKLYMFQIYNKDFSDKSHGTPNLHTMYFKLLFDENNHGQIRLSGGAELFMRRASLKKEELVVHPANSPIANKNPDNPKKTTTLSYDVYKDKRFSEDQYELHIPIAINKCPKNIFKINTEVRVLLKHDDNPYVIGIARGERNLLYIVVVDGKGNIVEQYSLNEIINNFNGIRIKTDYHSLLDKKEKERFEARQNWTSIENIKELKAGYISQVVHKICELVEKYDAVIALEDLNSGFKNSRVKVEKQVYQKFEKMLIDKLNYMVDKKSNPCATGGALKGYQITNKFESFKSMSTQNGFIFYIPAWLTSKIDPSTGFVNLLKTKYTSIADSKKFISSFDRIMYVPEEDLFEFALDYKNFSRTDADYIKKWKLYSYGNRIRIFRNPKKNNVFDWEEVCLTSAYKELFNKYGINYQQGDIRALLCEQSDKAFYSSFMALMSLMLQMRNSITGRTDVDFLISPVKNSDGIFYDSRNYEAQENAILPKNADANGAYNIARKVLWAIGQFKKAEDEKLDKVKIAISNKEWLEYAQTSVKH

SEQ ID NO: 460 - protein, 1304 aa, Synthetic construct
MSKLEKFTNCYSLSKTLRFKAIPVGKTQENIDNKRLLVEDEKRAEDYKGVKKLLDRYYLSFINDVLHSIKLKNLNNYISLFRKKTRTEKENKELENLEINLRKEIAKAFKGNEGYKSLFKKDIIETILPEFLDDKDEIALVNSFNGFTTAFTGFFDNRENMFSEEAKSTSIAFRCINENLTRYISNMDIFEKVDAIFDKHEVQEIKEKILNSDYDVEDFFEGEFFNFVLTQEGIDVYNAIIGGFVTESGGSSGRLREQALMRDKGLCLHCKNNRKIKVADMVDHIIPIKVDPSLKLKLENLQSLCNPCHNRKTAEDKKKYGGSSGEKIKGLNEYINLYNQKTKQKLPKFKPLYKQVLSDRESLSFYGEGYTSDEEVLEVFRNTLNKNSEIFSSIKKLEKLFKNFDEYSSAGIFVKNGPAISTISKDIFGEWNVIRDKWNAEYDDIHLKKKAVVTEKYEDDRRKSFKKIGSFSLEQLQEYADADLSVVEKLKEIIIQKVDEIYKVYGSSEKLFDADFVLEKSLKKNDAVVAIMKDLLDSVKSFENYIKAFFGEGKETNRDESFYGDFVLAYDILLKVDHIYDAIRNYVTQKPYSKDKFKLYFQNPQFMGGWDKDKETDYRATILRYGSKYYLAIMDKKYAKCLQKIDKDDVNGNYEKINYKLLPGPNKMLPKVFFSKKWMAYYNPSEDIQKIYKNGTFKKGDMFNLNDCHKLIDFFKDSISRYPKWSNAYDFNFSETEKYKDIAGFYREVEEQGYKVSFESASKKEVDKLVEEGKLYMFQIYNKDFSDKSHGTPNLHTMYFKLLFDENNHGQIRLSGGAELFMRRASLKKEELVVHPANSPIANKNPDNPKKTTTLSYDVYKDKRFSEDQYELHIPIAINKCPKNIFKINTEVRVLLKHDDNPYVIGIARGERNLLYIVVVDGKGNIVEQYSLNEIINNFNGIRIKTDYHSLLDKKEKERFEARQNWTSIENIKELKAGYISQVVHKICELVEKYDAVIALEDLNSGFKNSRVKVEKQVYQKFEKMLIDKLNYMVDKKSNPCATGGALKGYQITNKFESFKSMSTQNGFIFYIPAWLTSKIDPSTGFVNLLKTKYTSIADSKKFISSFDRIMYVPEEDLFEFALDYKNFSRTDADYIKKWKLYSYGNRIRIFRNPKKNNVFDWEEVCLTSAYKELFNKYGINYQQGDIRALLCEQSDKAFYSSFMALMSLMLQMRNSITGRTDVDFLISPVKNSDGIFYDSRNYEAQENAILPKNADANGAYNIARKVLWAIGQFKKAEDEKLDKVKIAISNKEWLEYAQTSVKH

SEQ ID NO: 461 - protein, 1356 aa, Synthetic construct
MSKLEKFTNCYSLSKTLRFKAIPVGKTQENIDNKRLLVEDEKRAEDYKGVKKLLDRYYLSFINDVLHSIKLKNLNNYISLFRKKTRTEKENKELENLEINLRKEIAKAFKGNEGYKSLFKKDIIETILPEFLDDKDEIALVNSFNGFTTAFTGFFDNRENMFSEEAKSTSIAFRCINENLTRYISNMDIFEKVDAIFDKHEVQEIKEKILNSDYDVEDFFEGEFFNFVLTQEGIDVYNAIIGGFVTESGGSSGSNNSYLRAKVFETEHGVCQLCNVNAQELFLRLRDAPKSQRKNLLYATWTSKLPLEQLNEMIRNPGEGHFWQVDHIKPVYGGGGQCSLDNLQTLCTVCHKERTARQAKERSQVRRQSLASKGSSGEKIKGLNEYINLYNQKTKQKLPKFKPLYKQVLSDRESLSFYGEGYTSDEEVLEVFRNTLNKNSEIFSSIKKLEKLFKNFDEYSSAGIFVKNGPAISTISKDIFGEWNVIRDKWNAEYDDIHLKKKAVVTEKYEDDRRKSFKKIGSFSLEQLQEYADADLSVVEKLKEIIIQKVDEIYKVYGSSEKLFDADFVLEKSLKKNDAVVAIMKDLLDSVKSFENYIKAFFGEGKETNRDESFYGDFVLAYDILLKVDHIYDAIRNYVTQKPYSKDKFKLYFQNPQFMGGWDKDKETDYRATILRYGSKYYLAIMDKKYAKCLQKIDKDDVNGNYEKINYKLLPGPNKMLPKVFFSKKWMAYYNPSEDIQKIYKNGTFKKGDMFNLNDCHKLIDFFKDSISRYPKWSNAYDFNFSETEKYKDIAGFYREVEEQGYKVSFESASKKEVDKLVEEGKLYMFQIYNKDFSDKSHGTPNLHTMYFKLLFDENNHGQIRLSGGAELFMRRASLKKEELVVHPANSPIANKNPDNPKKTTTLSYDVYKDKRFSEDQYELHIPIAINKCPKNIFKINTEVRVLLKHDDNPYVIGIARGERNLLYIVVVDGKGNIVEQYSLNEIINNFNGIRIKTDYHSLLDKKEKERFEARQNWTSIENIKELKAGYISQVVHKICELVEKYDAVIALEDLNSGFKNSRVKVEKQVYQKFEKMLIDKLNYMVDKKSNPCATGGALKGYQITNKFESFKSMSTQNGFIFYIPAWLTSKIDPSTGFVNLLKTKYTSIADSKKFISSFDRIMYVPEEDLFEFALDYKNFSRTDADYIKKWKLYSYGNRIRIFRNPKKNNVFDWEEVCLTSAYKELFNKYGINYQQGDIRALLCEQSDKAFYSSFMALMSLMLQMRNSITGRTDVDFLISPVKNSDGIFYDSRNYEAQENAILPKNADANGAYNIARKVLWAIGQFKKAEDEKLDKVKIAISNKEWLEYAQTSVKH

SEQ ID NO: 462 - protein, 1403 aa, Synthetic construct
MSKLEKFTNCYSLSKTLRFKAIPVGKTQENIDNKRLLVEDEKRAEDYKGVKKLLDRYYLSFINDVLHSIKLKNLNNYISLFRKKTRTEKENKELENLEINLRKEIAKAFKGNEGYKSLFKKDIIETILPEFLDDKDEIALVNSFNGFTTAFTGFFDNRENMFSEEAKSTSIAFRCINENLTRYISNMDIFEKVDAIFDKHEVQEIKEKILNSDYDVEDFFEGEFFNFVLTQEGIDVYNAIIGGFVTESGGSSGVREGFVTEKRAREMDGDMRRRAARNAKLFQEMQEKLNVQGKPSRADLWRYQSVQRQNCQCAYCGSPITFSNSEMDHIVPRAGQGSTNTRENLVAVCHRCNQSKGNTPFAIWAKNTSIEGVSVKEAVERTRHWVTDTGMRSTDFKKFTKAVVERFQRATMDEEIDARSGSSGEKIKGLNEYINLYNQKTKQKLPKFKPLYKQVLSDRESLSFYGEGYTSDEEVLEVFRNTLNKNSEIFSSIKKLEKLFKNFDEYSSAGIFVKNGPAISTISKDIFGEWNVIRDKWNAEYDDIHLKKKAVVTEKYEDDRRKSFKKIGSFSLEQLQEYADADLSVVEKLKEIIIQKVDEIYKVYGSSEKLFDADFVLEKSLKKNDAVVAIMKDLLDSVKSFENYIKAFFGEGKETNRDESFYGDFVLAYDILLKVDHIYDAIRNYVTQKPYSKDKFKLYFQNPQFMGGWDKDKETDYRATILRYGSKYYLAIMDKKYAKCLQKIDKDDVNGNYEKINYKLLPGPNKMLPKVFFSKKWMAYYNPSEDIQKIYKNGTFKKGDMFNLNDCHKLIDFFKDSISRYPKWSNAYDFNFSETEKYKDIAGFYREVEEQGYKVSFESASKKEVDKLVEEGKLYMFQIYNKDFSDKSHGTPNLHTMYFKLLFDENNHGQIRLSGGAELFMRRASLKKEELVVHPANSPIANKNPDNPKKTTTLSYDVYKDKRFSEDQYELHIPIAINKCPKNIFKINTEVRVLLKHDDNPYVIGIARGERNLLYIVVVDGKGNIVEQYSLNEIINNFNGIRIKTDYHSLLDKKEKERFEARQNWTSIENIKELKAGYISQVVHKICELVEKYDAVIALEDLNSGFKNSRVKVEKQVYQKFEKMLIDKLNYMVDKKSNPCATGGALKGYQITNKFESFKSMSTQNGFIFYIPAWLTSKIDPSTGFVNLLKTKYTSIADSKKFISSFDRIMYVPEEDLFEFALDYKNFSRTDADYIKKWKLYSYGNRIRIFRNPKKNNVFDWEEVCLTSAYKELFNKYGINYQQGDIRALLCEQSDKAFYSSFMALMSLMLQMRNSITGRTDVDFLISPVKNSDGIFYDSRNYEAQENAILPKNADANGAYNIARKVLWAIGQFKKAEDEKLDKVKIAISNKEWLEYAQTSVKH

SEQ ID NO: 463 - protein, 1380 aa, Synthetic construct
MSKLEKFTNCYSLSKTLRFKAIPVGKTQENIDNKRLLVEDEKRAEDYKGVKKLLDRYYLSFINDVLHSIKLKNLNNYISLFRKKTRTEKENKELENLEINLRKEIAKAFKGNEGYKSLFKKDIIETILPEFLDDKDEIALVNSFNGFTTAFTGFFDNRENMFSEEAKSTSIAFRCINENLTRYISNMDIFEKVDAIFDKHEVQEIKEKILNSDYDVEDFFEGEFFNFVLTQEGIDVYNAIIGGFVTESGGSSGENQFTNQGRRNSQQRLKGLTDSIKEFGSQILKEHPVENSQLQNDRLFLYYLQNGRDMYTGEELDIDYLSQYDIDHIIPQAFIKDNSIDNRVLTSSKENRGKSDDVPSKDVVRKMKSYWSKLLSAKLITQRKFDNLTKAERGGLTGSSGEKIKGLNEYINLYNQKTKQKLPKFKPLYKQVLSDRESLSFYGEGYTSDEEVLEVFRNTLNKNSEIFSSIKKLEKLFKNFDEYSSAGIFVKNGPAISTISKDIFGEWNVIRDKWNAEYDDIHLKKKAVVTEKYEDDRRKSFKKIGSFSLEQLQEYADADLSVVEKLKEIIIQKVDEIYKVYGSSEKLFDADFVLEKSLKKNDAVVAIMKDLLDSVKSFENYIKAFFGEGKETNRDESFYGDFVLAYDILLKVDHIYDAIRNYVTQKPYSKDKFKLYFQNPQFMGGWDKDKETDYRATILRYGSKYYLAIMDKKYAKCLQKIDKDDVNGNYEKINYKLLPGPNKMLPKVFFSKKWMAYYNPSEDIQKIYKNGTFKKGDMFNLNDCHKLIDFFKDSISRYPKWSNAYDFNFSETEKYKDIAGFYREVEEQGYKVSFESASKKEVDKLVEEGKLYMFQIYNKDFSDKSHGTPNLHTMYFKLLFDENNHGQIRLSGGAELFMRRASLKKEELVVHPANSPIANKNPDNPKKTTTLSYDVYKDKRFSEDQYELHIPIAINKCPKNIFKINTEVRVLLKHDDNPYVIGIARGERNLLYIVVVDGKGNIVEQYSLNEIINNFNGIRIKTDYHSLLDKKEKERFEARQNWTSIENIKELKAGYISQVVHKICELVEKYDAVIALEDLNSGFKNSRVKVEKQVYQKFEKMLIDKLNYMVDKKSNPCATGGALKGYQITNKFESFKSMSTQNGFIFYIPAWLTSKIDPSTGFVNLLKTKYTSIADSKKFISSFDRIMYVPEEDLFEFALDYKNFSRTDADYIKKWKLYSYGNRIRIFRNPKKNNVFDWEEVCLTSAYKELFNKYGINYQQGDIRALLCEQSDKAFYSSFMALMSLMLQMRNSITGRTDVDFLISPVKNSDGIFYDSRNYEAQENAILPKNADANGAYNIARKVLWAIGQFKKAEDEKLDKVKIAISNKEWLEYAQTSVKH

SEQ ID NO: 464 - protein, 1459 aa, Synthetic construct
MSKLEKFTNCYSLSKTLRFKAIPVGKTQENIDNKRLLVEDEKRAEDYKGVKKLLDRYYLSFINDVLHSIKLKNLNNYISLFRKKTRTEKENKELENLEINLRKEIAKAFKGNEGYKSLFKKDIIETILPEFLDDKDEIALVNSFNGFTTAFTGFFDNRENMFSEEAKSTSIAFRCINENLTRYISNMDIFEKVDAIFDKHEVQEIKEKILNSDYDVEDFFEGEFFNFVLTQEGIDVYNAIIGGFVTESGGSSGARVRTYPNVSHANTHYKNTVSSKLLPFTANYQLQLGELDNLNRATFSHIQLQDRHETKDVRTKINYDPVGWHNYQFPYGDGSKSSWVMNRGHLVGYQFCGLNDEPRNLVAMTAWLNTGAYSGANDSNPEGMLYYENRLDSWLALHPDFWLDYKVTPIYSGNEVVPRQIELQYVGIDSSGELLTIRLNSNKESIDENGVTTVILENSAPNINLDYLNGTATPKNGSSGEKIKGLNEYINLYNQKTKQKLPKFKPLYKQVLSDRESLSFYGEGYTSDEEVLEVFRNTLNKNSEIFSSIKKLEKLFKNFDEYSSAGIFVKNGPAISTISKDIFGEWNVIRDKWNAEYDDIHLKKKAVVTEKYEDDRRKSFKKIGSFSLEQLQEYADADLSVVEKLKEIIIQKVDEIYKVYGSSEKLFDADFVLEKSLKKNDAVVAIMKDLLDSVKSFENYIKAFFGEGKETNRDESFYGDFVLAYDILLKVDHIYDAIRNYVTQKPYSKDKFKLYFQNPQFMGGWDKDKETDYRATILRYGSKYYLAIMDKKYAKCLQKIDKDDVNGNYEKINYKLLPGPNKMLPKVFFSKKWMAYYNPSEDIQKIYKNGTFKKGDMFNLNDCHKLIDFFKDSISRYPKWSNAYDFNFSETEKYKDIAGFYREVEEQGYKVSFESASKKEVDKLVEEGKLYMFQIYNKDFSDKSHGTPNLHTMYFKLLFDENNHGQIRLSGGAELFMRRASLKKEELVVHPANSPIANKNPDNPKKTTTLSYDVYKDKRFSEDQYELHIPIAINKCPKNIFKINTEVRVLLKHDDNPYVIGIARGERNLLYIVVVDGKGNIVEQYSLNEIINNFNGIRIKTDYHSLLDKKEKERFEARQNWTSIENIKELKAGYISQVVHKICELVEKYDAVIALEDLNSGFKNSRVKVEKQVYQKFEKMLIDKLNYMVDKKSNPCATGGALKGYQITNKFESFKSMSTQNGFIFYIPAWLTSKIDPSTGFVNLLKTKYTSIADSKKFISSFDRIMYVPEEDLFEFALDYKNFSRTDADYIKKWKLYSYGNRIRIFRNPKKNNVFDWEEVCLTSAYKELFNKYGINYQQGDIRALLCEQSDKAFYSSFMALMSLMLQMRNSITGRTDVDFLISPVKNSDGIFYDSRNYEAQENAILPKNADANGAYNIARKVLWAIGQFKKAEDEKLDKVKIAISNKEWLEYAQTSVKH

SEQ ID NO: 465 - protein, 1506 aa, Synthetic construct
MSKLEKFTNCYSLSKTLRFKAIPVGKTQENIDNKRLLVEDEKRAEDYKGVKKLLDRYYLSFINDVLHSIKLKNLNNYISLFRKKTRTEKENKELENLEINLRKEIAKAFKGNEGYKSLFKKDIIETILPEFLDDKDEIALVNSFNGFTTAFTGFFDNRENMFSEEAKSTSIAFRCINENLTRYISNMDIFEKVDAIFDKHEVQEIKEKILNSDYDVEDFFEGEFFNFVLTQEGIDVYNAIIGGFVTESGGSSGAAPNIHGWGKEGHEIICKIAQTRLDETAAKAVKELLPESAEGDLSSLCLWADRVKFRYHWSSPLHYINTPDACSYQYNRDCKDESGEKGRCVAGAIYNYTTQLLSYKTAASSQSQYNLTEALLFVSHFMGDIHQPLHVSYASDKGGNTIEVHWYTRKANLHHIWDSNIIETAEADLYNSALEGMVDALKKNITTEWADQVKRWETCTKKTACPDIYASEGIQAACDWAYKGVTEGDTLEDEYFYSRLPIVYQRLAQGGVRLAATLNRIFGGSSGEKIKGLNEYINLYNQKTKQKLPKFKPLYKQVLSDRESLSFYGEGYTSDEEVLEVFRNTLNKNSEIFSSIKKLEKLFKNFDEYSSAGIFVKNGPAISTISKDIFGEWNVIRDKWNAEYDDIHLKKKAVVTEKYEDDRRKSFKKIGSFSLEQLQEYADADLSVVEKLKEIIIQKVDEIYKVYGSSEKLFDADFVLEKSLKKNDAVVAIMKDLLDSVKSFENYIKAFFGEGKETNRDESFYGDFVLAYDILLKVDHIYDAIRNYVTQKPYSKDKFKLYFQNPQFMGGWDKDKETDYRATILRYGSKYYLAIMDKKYAKCLQKIDKDDVNGNYEKINYKLLPGPNKMLPKVFFSKKWMAYYNPSEDIQKIYKNGTFKKGDMFNLNDCHKLIDFFKDSISRYPKWSNAYDFNFSETEKYKDIAGFYREVEEQGYKVSFESASKKEVDKLVEEGKLYMFQIYNKDFSDKSHGTPNLHTMYFKLLFDENNHGQIRLSGGAELFMRRASLKKEELVVHPANSPIANKNPDNPKKTTTLSYDVYKDKRFSEDQYELHIPIAINKCPKNIFKINTEVRVLLKHDDNPYVIGIARGERNLLYIVVVDGKGNIVEQYSLNEIINNFNGIRIKTDYHSLLDKKEKERFEARQNWTSIENIKELKAGYISQVVHKICELVEKYDAVIALEDLNSGFKNSRVKVEKQVYQKFEKMLIDKLNYMVDKKSNPCATGGALKGYQITNKFESFKSMSTQNGFIFYIPAWLTSKIDPSTGFVNLLKTKYTSIADSKKFISSFDRIMYVPEEDLFEFALDYKNFSRTDADYIKKWKLYSYGNRIRIFRNPKKNNVFDWEEVCLTSAYKELFNKYGINYQQGDIRALLCEQSDKAFYSSFMALMSLMLQMRNSITGRTDVDFLISPVKNSDGIFYDSRNYEAQENAILPKNADANGAYNIARKVLWAIGQFKKAEDEKLDKVKIAISNKEWLEYAQTSVKH

SEQ ID NO: 466 - protein, 1320 aa, Synthetic construct
MSKLEKFTNCYSLSKTLRFKAIPVGKTQENIDNKRLLVEDEKRAEDYKGVKKLLDRYYLSFINDVLHSIKLKNLNNYISLFRKKTRTEKENKELENLEINLRKEIAKAFKGNEGYKSLFKKDIIETILPEFLDDKDEIALVNSFNGFTTAFTGFFDNRENMFSEEAKSTSIAFRCINENLTRYISNMDIFEKVDAIFDKHEVQEIKEKILNSDYDVEDFFEGEFFNFVLTQEGIDVYNAIIGGFVTESGGSSGIDGVKLSSTEKKKMDEIAPPKGSVFTCPICEKRSIVGVTANLVHDHNHDTGWGREWICDSCNTGLGRFKDNPKFLEKVIEYLKKGSSGEKIKGLNEYINLYNQKTKQKLPKFKPLYKQVLSDRESLSFYGEGYTSDEEVLEVFRNTLNKNSEIFSSIKKLEKLFKNFDEYSSAGIFVKNGPAISTISKDIFGEWNVIRDKWNAEYDDIHLKKKAVVTEKYEDDRRKSFKKIGSFSLEQLQEYADADLSVVEKLKEIIIQKVDEIYKVYGSSEKLFDADFVLEKSLKKNDAVVAIMKDLLDSVKSFENYIKAFFGEGKETNRDESFYGDFVLAYDILLKVDHIYDAIRNYVTQKPYSKDKFKLYFQNPQFMGGWDKDKETDYRATILRYGSKYYLAIMDKKYAKCLQKIDKDDVNGNYEKINYKLLPGPNKMLPKVFFSKKWMAYYNPSEDIQKIYKNGTFKKGDMFNLNDCHKLIDFFKDSISRYPKWSNAYDFNFSETEKYKDIAGFYREVEEQGYKVSFESASKKEVDKLVEEGKLYMFQIYNKDFSDKSHGTPNLHTMYFKLLFDENNHGQIRLSGGAELFMRRASLKKEELVVHPANSPIANKNPDNPKKTTTLSYDVYKDKRFSEDQYELHIPIAINKCPKNIFKINTEVRVLLKHDDNPYVIGIARGERNLLYIVVVDGKGNIVEQYSLNEIINNFNGIRIKTDYHSLLDKKEKERFEARQNWTSIENIKELKAGYISQVVHKICELVEKYDAVIALEDLNSGFKNSRVKVEKQVYQKFEKMLIDKLNYMVDKKSNPCATGGALKGYQITNKFESFKSMSTQNGFIFYIPAWLTSKIDPSTGFVNLLKTKYTSIADSKKFISSFDRIMYVPEEDLFEFALDYKNFSRTDADYIKKWKLYSYGNRIRIFRNPKKNNVFDWEEVCLTSAYKELFNKYGINYQQGDIRALLCEQSDKAFYSSFMALMSLMLQMRNSITGRTDVDFLISPVKNSDGIFYDSRNYEAQENAILPKNADANGAYNIARKVLWAIGQFKKAEDEKLDKVKIAISNKEWLEYAQTSVKH

SEQ ID NO: 467 - protein, 1333 aa, Synthetic construct
MSKLEKFTNCYSLSKTLRFKAIPVGKTQENIDNKRLLVEDEKRAEDYKGVKKLLDRYYLSFINDVLHSIKLKNLNNYISLFRKKTRTEKENKELENLEINLRKEIAKAFKGNEGYKSLFKKDIIETILPEFLDDKDEIALVNSFNGFTTAFTGFFDNRENMFSEEAKSTSIAFRCINENLTRYISNMDIFEKVDAIFDKHEVQEIKEKILNSDYDVEDFFEGEFFNFVLTQEGIDVYNAIIGGFVTESGGSSGMNYFIVEVSEQEVKREKEKARELRRSQWWKNRIARGICHYCGEIFPPEELTMDHLVPVVRGGKSTRGNVVPACKECNNRKKYLLPVEWEEYLDSLESGSSGEKIKGLNEYINLYNQKTKQKLPKFKPLYKQVLSDRESLSFYGEGYTSDEEVLEVFRNTLNKNSEIFSSIKKLEKLFKNFDEYSSAGIFVKNGPAISTISKDIFGEWNVIRDKWNAEYDDIHLKKKAVVTEKYEDDRRKSFKKIGSFSLEQLQEYADADLSVVEKLKEIIIQKVDEIYKVYGSSEKLFDADFVLEKSLKKNDAVVAIMKDLLDSVKSFENYIKAFFGEGKETNRDESFYGDFVLAYDILLKVDHIYDAIRNYVTQKPYSKDKFKLYFQNPQFMGGWDKDKETDYRATILRYGSKYYLAIMDKKYAKCLQKIDKDDVNGNYEKINYKLLPGPNKMLPKVFFSKKWMAYYNPSEDIQKIYKNGTFKKGDMFNLNDCHKLIDFFKDSISRYPKWSNAYDFNFSETEKYKDIAGFYREVEEQGYKVSFESASKKEVDKLVEEGKLYMFQIYNKDFSDKSHGTPNLHTMYFKLLFDENNHGQIRLSGGAELFMRRASLKKEELVVHPANSPIANKNPDNPKKTTTLSYDVYKDKRFSEDQYELHIPIAINKCPKNIFKINTEVRVLLKHDDNPYVIGIARGERNLLYIVVVDGKGNIVEQYSLNEIINNFNGIRIKTDYHSLLDKKEKERFEARQNWTSIENIKELKAGYISQVVHKICELVEKYDAVIALEDLNSGFKNSRVKVEKQVYQKFEKMLIDKLNYMVDKKSNPCATGGALKGYQITNKFESFKSMSTQNGFIFYIPAWLTSKIDPSTGFVNLLKTKYTSIADSKKFISSFDRIMYVPEEDLFEFALDYKNFSRTDADYIKKWKLYSYGNRIRIFRNPKKNNVFDWEEVCLTSAYKELFNKYGINYQQGDIRALLCEQSDKAFYSSFMALMSLMLQMRNSITGRTDVDFLISPVKNSDGIFYDSRNYEAQENAILPKNADANGAYNIARKVLWAIGQFKKAEDEKLDKVKIAISNKEWLEYAQTSVKH

SEQ ID NO: 468 - protein, 1496 aa, Synthetic construct
MSKLEKFTNCYSLSKTLRFKAIPVGKTQENIDNKRLLVEDEKRAEDYKGVKKLLDRYYLSFINDVLHSIKLKNLNNYISLFRKKTRTEKENKELENLEINLRKEIAKAFKGNEGYKSLFKKDIIETILPEFLDDKDEIALVNSFNGFTTAFTGFFDNRENMFSEEAKSTSIAFRCINENLTRYISNMDIFEKVDAIFDKHEVQEIKEKILNSDYDVEDFFEGEFFNFVLTQEGIDVYNAIIGGFVTESGGSSGGKAQLDIKNFPELYRTTERVYKKSGQSTKPVTVSNIHYSVLDGYGRSGEAYGIITKDMIDMSAGYREKWESKPEPSGWYSYFFKNTNQRATESDYKHSPKNVSKISNNIKASILLSNGNVRNGYLFDRSHLIADSLGGRPFRNNLITGTRTQNVGNNDRKGGMQYIENKVLDHIKRNPKVHVYYKATPVYQGSELLPRAVLVSALSSDGFIDETVRVFNNVAGFNIDYQNGGLLSSTADVDINNVEENEIETTDDEIEEGGSSGEKIKGLNEYINLYNQKTKQKLPKFKPLYKQVLSDRESLSFYGEGYTSDEEVLEVFRNTLNKNSEIFSSIKKLEKLFKNFDEYSSAGIFVKNGPAISTISKDIFGEWNVIRDKWNAEYDDIHLKKKAVVTEKYEDDRRKSFKKIGSFSLEQLQEYADADLSVVEKLKEIIIQKVDEIYKVYGSSEKLFDADFVLEKSLKKNDAVVAIMKDLLDSVKSFENYIKAFFGEGKETNRDESFYGDFVLAYDILLKVDHIYDAIRNYVTQKPYSKDKFKLYFQNPQFMGGWDKDKETDYRATILRYGSKYYLAIMDKKYAKCLQKIDKDDVNGNYEKINYKLLPGPNKMLPKVFFSKKWMAYYNPSEDIQKIYKNGTFKKGDMFNLNDCHKLIDFFKDSISRYPKWSNAYDFNFSETEKYKDIAGFYREVEEQGYKVSFESASKKEVDKLVEEGKLYMFQIYNKDFSDKSHGTPNLHTMYFKLLFDENNHGQIRLSGGAELFMRRASLKKEELVVHPANSPIANKNPDNPKKTTTLSYDVYKDKRFSEDQYELHIPIAINKCPKNIFKINTEVRVLLKHDDNPYVIGIARGERNLLYIVVVDGKGNIVEQYSLNEIINNFNGIRIKTDYHSLLDKKEKERFEARQNWTSIENIKELKAGYISQVVHKICELVEKYDAVIALEDLNSGFKNSRVKVEKQVYQKFEKMLIDKLNYMVDKKSNPCATGGALKGYQITNKFESFKSMSTQNGFIFYIPAWLTSKIDPSTGFVNLLKTKYTSIADSKKFISSFDRIMYVPEEDLFEFALDYKNFSRTDADYIKKWKLYSYGNRIRIFRNPKKNNVFDWEEVCLTSAYKELFNKYGINYQQGDIRALLCEQSDKAFYSSFMALMSLMLQMRNSITGRTDVDFLISPVKNSDGIFYDSRNYEAQENAILPKNADANGAYNIARKVLWAIGQFKKAEDEKLDKVKIAISNKEWLEYAQTSVKH

SEQ ID NO: 469 - protein, 1380 aa, Synthetic construct
MSKLEKFTNCYSLSKTLRFKAIPVGKTQENIDNKRLLVEDEKRAEDYKGVKKLLDRYYLSFINDVLHSIKLKNLNNYISLFRKKTRTEKENKELENLEINLRKEIAKAFKGNEGYKSLFKKDIIETILPEFLDDKDEIALVNSFNGFTTAFTGFFDNRENMFSEEAKSTSIAFRCINENLTRYISNMDIFEKVDAIFDKHEVQEIKEKILNSDYDVEDFFEGEFFNFVLTQEGIDVYNAIIGGFVTESGGSSGENQTTGKGKNNSRPRYKSLEKAIKEFGSQILKEHPTDNQELRNNRLYLYYLQNGKDMYTGQDLDIHNLSNYDIDHIVPQSFITDNSIDNLVLTSSAGNREKGDDVPPLEIVRKRKVFWEKLYQGNLMSKRKFDYLTKAERGGLTGSSGEKIKGLNEYINLYNQKTKQKLPKFKPLYKQVLSDRESLSFYGEGYTSDEEVLEVFRNTLNKNSEIFSSIKKLEKLFKNFDEYSSAGIFVKNGPAISTISKDIFGEWNVIRDKWNAEYDDIHLKKKAVVTEKYEDDRRKSFKKIGSFSLEQLQEYADADLSVVEKLKEIIIQKVDEIYKVYGSSEKLFDADFVLEKSLKKNDAVVAIMKDLLDSVKSFENYIKAFFGEGKETNRDESFYGDFVLAYDILLKVDHIYDAIRNYVTQKPYSKDKFKLYFQNPQFMGGWDKDKETDYRATILRYGSKYYLAIMDKKYAKCLQKIDKDDVNGNYEKINYKLLPGPNKMLPKVFFSKKWMAYYNPSEDIQKIYKNGTFKKGDMFNLNDCHKLIDFFKDSISRYPKWSNAYDFNFSETEKYKDIAGFYREVEEQGYKVSFESASKKEVDKLVEEGKLYMFQIYNKDFSDKSHGTPNLHTMYFKLLFDENNHGQIRLSGGAELFMRRASLKKEELVVHPANSPIANKNPDNPKKTTTLSYDVYKDKRFSEDQYELHIPIAINKCPKNIFKINTEVRVLLKHDDNPYVIGIARGERNLLYIVVVDGKGNIVEQYSLNEIINNFNGIRIKTDYHSLLDKKEKERFEARQNWTSIENIKELKAGYISQVVHKICELVEKYDAVIALEDLNSGFKNSRVKVEKQVYQKFEKMLIDKLNYMVDKKSNPCATGGALKGYQITNKFESFKSMSTQNGFIFYIPAWLTSKIDPSTGFVNLLKTKYTSIADSKKFISSFDRIMYVPEEDLFEFALDYKNFSRTDADYIKKWKLYSYGNRIRIFRNPKKNNVFDWEEVCLTSAYKELFNKYGINYQQGDIRALLCEQSDKAFYSSFMALMSLMLQMRNSITGRTDVDFLISPVKNSDGIFYDSRNYEAQENAILPKNADANGAYNIARKVLWAIGQFKKAEDEKLDKVKIAISNKEWLEYAQTSVKH

SEQ ID NO: 470 - protein, 1323 aa, Synthetic construct
MSKLEKFTNCYSLSKTLRFKAIPVGKTQENIDNKRLLVEDEKRAEDYKGVKKLLDRYYLSFINDVLHSIKLKNLNNYISLFRKKTRTEKENKELENLEINLRKEIAKAFKGNEGYKSLFKKDIIETILPEFLDDKDEIALVNSFNGFTTAFTGFFDNRENMFSEEAKSTSIAFRCINENLTRYISNMDIFEKVDAIFDKHEVQEIKEKILNSDYDVEDFFEGEFFNFVLTQEGIDVYNAIIGGFVTESGGSSGMELKNSISDYTEAEFVQLLKEIEKENVAATDDVLDVLLEHFVKITEHPDGTDLIYYPSDNRDDSPEGIVKEIKEWRAANGKPGFKQGGSSGEKIKGLNEYINLYNQKTKQKLPKFKPLYKQVLSDRESLSFYGEGYTSDEEVLEVFRNTLNKNSEIFSSIKKLEKLFKNFDEYSSAGIFVKNGPAISTISKDIFGEWNVIRDKWNAEYDDIHLKKKAVVTEKYEDDRRKSFKKIGSFSLEQLQEYADADLSVVEKLKEIIIQKVDEIYKVYGSSEKLFDADFVLEKSLKKNDAVVAIMKDLLDSVKSFENYIKAFFGEGKETNRDESFYGDFVLAYDILLKVDHIYDAIRNYVTQKPYSKDKFKLYFQNPQFMGGWDKDKETDYRATILRYGSKYYLAIMDKKYAKCLQKIDKDDVNGNYEKINYKLLPGPNKMLPKVFFSKKWMAYYNPSEDIQKIYKNGTFKKGDMFNLNDCHKLIDFFKDSISRYPKWSNAYDFNFSETEKYKDIAGFYREVEEQGYKVSFESASKKEVDKLVEEGKLYMFQIYNKDFSDKSHGTPNLHTMYFKLLFDENNHGQIRLSGGAELFMRRASLKKEELVVHPANSPIANKNPDNPKKTTTLSYDVYKDKRFSEDQYELHIPIAINKCPKNIFKINTEVRVLLKHDDNPYVIGIARGERNLLYIVVVDGKGNIVEQYSLNEIINNFNGIRIKTDYHSLLDKKEKERFEARQNWTSIENIKELKAGYISQVVHKICELVEKYDAVIALEDLNSGFKNSRVKVEKQVYQKFEKMLIDKLNYMVDKKSNPCATGGALKGYQITNKFESFKSMSTQNGFIFYIPAWLTSKIDPSTGFVNLLKTKYTSIADSKKFISSFDRIMYVPEEDLFEFALDYKNFSRTDADYIKKWKLYSYGNRIRIFRNPKKNNVFDWEEVCLTSAYKELFNKYGINYQQGDIRALLCEQSDKAFYSSFMALMSLMLQMRNSITGRTDVDFLISPVKNSDGIFYDSRNYEAQENAILPKNADANGAYNIARKVLWAIGQFKKAEDEKLDKVKIAISNKEWLEYAQTSVKH

SEQ ID NO: 471 - protein, 1323 aa, Synthetic construct
MSKLEKFTNCYSLSKTLRFKAIPVGKTQENIDNKRLLVEDEKRAEDYKGVKKLLDRYYLSFINDVLHSIKLKNLNNYISLFRKKTRTEKENKELENLEINLRKEIAKAFKGNEGYKSLFKKDIIETILPEFLDDKDEIALVNSFNGFTTAFTGFFDNRENMFSEEAKSTSIAFRCINENLTRYISNMDIFEKVDAIFDKHEVQEIKEKILNSDYDVEDFFEGEFFNFVLTQEGIDVYNAIIGGFVTESGGSSGMKSKISEYTEKEFLEFVKDIYTNNKKKFPTEESHIQAVLEFKKLTEHPSGSDLLYYPNENREDSPAGVVKEVKEWRASKGLPGFKAGGSSGEKIKGLNEYINLYNQKTKQKLPKFKPLYKQVLSDRESLSFYGEGYTSDEEVLEVFRNTLNKNSEIFSSIKKLEKLFKNFDEYSSAGIFVKNGPAISTISKDIFGEWNVIRDKWNAEYDDIHLKKKAVVTEKYEDDRRKSFKKIGSFSLEQLQEYADADLSVVEKLKEIIIQKVDEIYKVYGSSEKLFDADFVLEKSLKKNDAVVAIMKDLLDSVKSFENYIKAFFGEGKETNRDESFYGDFVLAYDILLKVDHIYDAIRNYVTQKPYSKDKFKLYFQNPQFMGGWDKDKETDYRATILRYGSKYYLAIMDKKYAKCLQKIDKDDVNGNYEKINYKLLPGPNKMLPKVFFSKKWMAYYNPSEDIQKIYKNGTFKKGDMFNLNDCHKLIDFFKDSISRYPKWSNAYDFNFSETEKYKDIAGFYREVEEQGYKVSFESASKKEVDKLVEEGKLYMFQIYNKDFSDKSHGTPNLHTMYFKLLFDENNHGQIRLSGGAELFMRRASLKKEELVVHPANSPIANKNPDNPKKTTTLSYDVYKDKRFSEDQYELHIPIAINKCPKNIFKINTEVRVLLKHDDNPYVIGIARGERNLLYIVVVDGKGNIVEQYSLNEIINNFNGIRIKTDYHSLLDKKEKERFEARQNWTSIENIKELKAGYISQVVHKICELVEKYDAVIALEDLNSGFKNSRVKVEKQVYQKFEKMLIDKLNYMVDKKSNPCATGGALKGYQITNKFESFKSMSTQNGFIFYIPAWLTSKIDPSTGFVNLLKTKYTSIADSKKFISSFDRIMYVPEEDLFEFALDYKNFSRTDADYIKKWKLYSYGNRIRIFRNPKKNNVFDWEEVCLTSAYKELFNKYGINYQQGDIRALLCEQSDKAFYSSFMALMSLMLQMRNSITGRTDVDFLISPVKNSDGIFYDSRNYEAQENAILPKNADANGAYNIARKVLWAIGQFKKAEDEKLDKVKIAISNKEWLEYAQTSVKH

SEQ ID NO: 472 - protein, 1511 aa, Synthetic construct
MSKLEKFTNCYSLSKTLRFKAIPVGKTQENIDNKRLLVEDEKRAEDYKGVKKLLDRYYLSFINDVLHSIKLKNLNNYISLFRKKTRTEKENKELENLEINLRKEIAKAFKGNEGYKSLFKKDIIETILPEFLDDKDEIALVNSFNGFTTAFTGFFDNRENMFSEEAKSTSIAFRCINENLTRYISNMDIFEKVDAIFDKHEVQEIKEKILNSDYDVEDFFEGEFFNFVLTQEGIDVYNAIIGGFVTESGGSSGWRRRREDARAAPGLLGRLPVLPVAAAAELPPVPGGPRGPGELAKYGLPGLAQLKSRESYVLCYDPRTRGALWVVEQLRPERLRGDGDRRECDFREDDSVHAYHRATNADYRGSGFDRGHLAAAANHRWSQKAMDDTFYLSNVAPQVPHLNQNAWNNLEKYSRSLTRSYQNVYVCTGPLFLPRTEADGKSYVKYQVIGKNHVAVPTHFFKVLILEAAGGQIELRTYVMPNAPVDEAIPLERFLVPIESIERASGLLFVPNILARAGSLKAITAGSKGSSGEKIKGLNEYINLYNQKTKQKLPKFKPLYKQVLSDRESLSFYGEGYTSDEEVLEVFRNTLNKNSEIFSSIKKLEKLFKNFDEYSSAGIFVKNGPAISTISKDIFGEWNVIRDKWNAEYDDIHLKKKAVVTEKYEDDRRKSFKKIGSFSLEQLQEYADADLSVVEKLKEIIIQKVDEIYKVYGSSEKLFDADFVLEKSLKKNDAVVAIMKDLLDSVKSFENYIKAFFGEGKETNRDESFYGDFVLAYDILLKVDHIYDAIRNYVTQKPYSKDKFKLYFQNPQFMGGWDKDKETDYRATILRYGSKYYLAIMDKKYAKCLQKIDKDDVNGNYEKINYKLLPGPNKMLPKVFFSKKWMAYYNPSEDIQKIYKNGTFKKGDMFNLNDCHKLIDFFKDSISRYPKWSNAYDFNFSETEKYKDIAGFYREVEEQGYKVSFESASKKEVDKLVEEGKLYMFQIYNKDFSDKSHGTPNLHTMYFKLLFDENNHGQIRLSGGAELFMRRASLKKEELVVHPANSPIANKNPDNPKKTTTLSYDVYKDKRFSEDQYELHIPIAINKCPKNIFKINTEVRVLLKHDDNPYVIGIARGERNLLYIVVVDGKGNIVEQYSLNEIINNFNGIRIKTDYHSLLDKKEKERFEARQNWTSIENIKELKAGYISQVVHKICELVEKYDAVIALEDLNSGFKNSRVKVEKQVYQKFEKMLIDKLNYMVDKKSNPCATGGALKGYQITNKFESFKSMSTQNGFIFYIPAWLTSKIDPSTGFVNLLKTKYTSIADSKKFISSFDRIMYVPEEDLFEFALDYKNFSRTDADYIKKWKLYSYGNRIRIFRNPKKNNVFDWEEVCLTSAYKELFNKYGINYQQGDIRALLCEQSDKAFYSSFMALMSLMLQMRNSITGRTDVDFLISPVKNSDGIFYDSRNYEAQENAILPKNADANGAYNIARKVLWAIGQFKKAEDEKLDKVKIAISNKEWLEYAQTSVKH

SEQ ID NO: 473 - protein, 1372 aa, Synthetic construct
MSKLEKFTNCYSLSKTLRFKAIPVGKTQENIDNKRLLVEDEKRAEDYKGVKKLLDRYYLSFINDVLHSIKLKNLNNYISLFRKKTRTEKENKELENLEINLRKEIAKAFKGNEGYKSLFKKDIIETILPEFLDDKDEIALVNSFNGFTTAFTGFFDNRENMFSEEAKSTSIAFRCINENLTRYISNMDIFEKVDAIFDKHEVQEIKEKILNSDYDVEDFFEGEFFNFVLTQEGIDVYNAIIGGFVTESGGSSGDEPGVATGNGQPVTGNWLAGASQGDGVPIPSQIADQLRGKEFKSWRDFREQFWMAVSKDPSALENLSPSNRYFVSQGLAPYAVPEEHLGSKEKFEIHHVVPLESGGALYNIDNLVIVTPKRHSEIHKELKLKRKEKGSSGEKIKGLNEYINLYNQKTKQKLPKFKPLYKQVLSDRESLSFYGEGYTSDEEVLEVFRNTLNKNSEIFSSIKKLEKLFKNFDEYSSAGIFVKNGPAISTISKDIFGEWNVIRDKWNAEYDDIHLKKKAVVTEKYEDDRRKSFKKIGSFSLEQLQEYADADLSVVEKLKEIIIQKVDEIYKVYGSSEKLFDADFVLEKSLKKNDAVVAIMKDLLDSVKSFENYIKAFFGEGKETNRDESFYGDFVLAYDILLKVDHIYDAIRNYVTQKPYSKDKFKLYFQNPQFMGGWDKDKETDYRATILRYGSKYYLAIMDKKYAKCLQKIDKDDVNGNYEKINYKLLPGPNKMLPKVFFSKKWMAYYNPSEDIQKIYKNGTFKKGDMFNLNDCHKLIDFFKDSISRYPKWSNAYDFNFSETEKYKDIAGFYREVEEQGYKVSFESASKKEVDKLVEEGKLYMFQIYNKDFSDKSHGTPNLHTMYFKLLFDENNHGQIRLSGGAELFMRRASLKKEELVVHPANSPIANKNPDNPKKTTTLSYDVYKDKRFSEDQYELHIPIAINKCPKNIFKINTEVRVLLKHDDNPYVIGIARGERNLLYIVVVDGKGNIVEQYSLNEIINNFNGIRIKTDYHSLLDKKEKERFEARQNWTSIENIKELKAGYISQVVHKICELVEKYDAVIALEDLNSGFKNSRVKVEKQVYQKFEKMLIDKLNYMVDKKSNPCATGGALKGYQITNKFESFKSMSTQNGFIFYIPAWLTSKIDPSTGFVNLLKTKYTSIADSKKFISSFDRIMYVPEEDLFEFALDYKNFSRTDADYIKKWKLYSYGNRIRIFRNPKKNNVFDWEEVCLTSAYKELFNKYGINYQQGDIRALLCEQSDKAFYSSFMALMSLMLQMRNSITGRTDVDFLISPVKNSDGIFYDSRNYEAQENAILPKNADANGAYNIARKVLWAIGQFKKAEDEKLDKVKIAISNKEWLEYAQTSVKH

SEQ ID NO: 474 - protein, 1787 aa, Synthetic construct
MKRTADGSEFESPKKKRKVSKLEKFTNCYSLSKTLRFKAIPVGKTQENIDNKRLLVEDEKRAEDYKGVKKLLDRYYLSFINDVLHSIKLKNLNNYISLFRKKTRTEKENKELENLEINLRKEIAKAFKGNEGYKSLFKKDIIETILPEFLDDKDEIALVNSFNGFTTAFTGFFDNRENMFSEEAKSTSIAFRCINENLTRYISNMDIFEKVDAIFDKHEVQEIKEKILNSDYDVEDFFEGEFFNFVLTQEGIDVYNAIIGGFVTESGEKIKGLNEYINLYNQKTKQKLPKFKPLYKQVLSDRESLSFYGEGSSGENQTTQKGQKNSRERMKRIEEGIKELGSQILKEHPVENTQLQNEKLYLYYLQNGRDMYVDQELDINRLSDYDVDHIVPQSFLKDDSIDNKVLTRSDKNRGKSDNVPSEEVVKKMKNYWRQLLNAKLITQRKFDNLTKAERGGLSGYTSDEEVLEVFRNTLNKNSEIFSSIKKLEKLFKNFDEYSSAGIFVKNGPAISTISKDIFGEWNVIRDKWNAEYDDIHLKKKAVVTEKYEDDRRKSFKKIGSFSLEQLQEYADADLSVVEKLKEIIIQKVDEIYKVYGSSEKLFDADFVLEKSLKKNDAVVAIMKDLLDSVKSFENYIKAFFGEGKETNRDESFYGDFVLAYDILLKVDHIYDAIRNYVTQKPYSKDKFKLYFQNPQFMGGWDKDKETDYRATILRYGSKYYLAIMDKKYAKCLQKIDKDDVNGNYEKINYKLLPGPNKMLPKVFFSKKWMAYYNPSEDIQKIYKNGTFKKGDMFNLNDCHKLIDFFKDSISRYPKWSNAYDFNFSETEKYKDIAGFYREVEEQGYKVSFESASKKEVDKLVEEGKLYMFQIYNKDFSDKSHGTPNLHTMYFKLLFDENNHGQIRLSGGAELFMRRASLKKEELVVHPANSPIANKNPDNPKKTTTLSYDVYKDKRFSEDQYELHIPIAINKCPKNIFKINTEVRVLLKHDDNPYVIGIARGERNLLYIVVVDGKGNIVEQYSLNEIINNFNGIRIKTDYHSLLDKKEKERFEARQNWTSIENIKELKAGYISQVVHKICELVEKYDAVIALEDLNSGFKNSRVKVEKQVYQKFEKMLIDKLNYMVDKKSNPCATGGALKGYQITNKFESFKSMSTQNGFIFYIPAWLTSKIDPSTGFVNLLKTKYTSIADSKKFISSFDRIMYVPEEDLFEFALDYKNFSRTDADYIKKWKLYSYGNRIRIFRNPKKNNVFDWEEVCLTSAYKELFNKYGINYQQGDIRALLCEQSDKAFYSSFMALMSLMLQMRNSITGRTDVDFLISPVKNSDGIFYDSRNYEAQENAILPKNADANGAYNIARKVLWAIGQFKKAEDEKLDKVKIAISNKEWLEYAQTSVKHGGGGSGGGGSGGGGSGPKKKRKVAAAGSEELLSKNYHLENEVARLKKGSGSGGSGSGGSGSGSGGSGSGGSGSGEELLSKNYHLENEVARLKKGSGSGGSGSGGSGSGSGGSGSGGSGSGEELLSKNYHLENEVARLKKGSGSGGSGSGGSGSGSGGSGSGGSGSGEELLSKNYHLENEVARLKKGSGSGGSGSGGSGSGSGGSGSGGSGSGEELLSKNYHLENEVARLKKGSGSGGSGSGGSGSGSGGSGSGGSGSGEELLSKNYHLENEVARLKKGSGSGGSGSGGSGSGSGGSGSGGSGSGEELLSKNYHLENEVARLKKGSGSGGSGSGGSGSGSGGSGSGGSGSGEELLSKNYHLENEVARLKKSGGSKRTADGSEFEPKKKRKVGSG

SEQ ID NO: 475 - protein, 1787 aa, Synthetic construct
MKRTADGSEFESPKKKRKVSKLEKFTNCYSLSKTLRFKAIPVGKTQENIDNKRLLVEDEKRAEDYKGVKKLLDRYYLSFINDVLHSIKLKNLNNYISLFRKKTRTEKENKELENLEINLRKEIAKAFKGNEGYKSLFKKDIIETILPEFLDDKDEIALVNSFNGFTTAFTGFFDNRENMFSEEAKSTSIAFRCINENLTRYISNMDIFEKVDAIFDKHEVQEIKEKILNSDYDVEDFFEGEFFNFVLTQEGIDVYNAIIGGFVTESGEKIKGLNEYINLYNQKTKQKLPKFKPLYKQVLSDRESLSFYGGSSGENQTTQKGQKNSRERMKRIEEGIKELGSQILKEHPVENTQLQNEKLYLYYLQNGRDMYVDQELDINRLSDYDVDHIVPQSFLKDDSIDNKVLTRSDKNRGKSDNVPSEEVVKKMKNYWRQLLNAKLITQRKFDNLTKAERGGLSEGYTSDEEVLEVFRNTLNKNSEIFSSIKKLEKLFKNFDEYSSAGIFVKNGPAISTISKDIFGEWNVIRDKWNAEYDDIHLKKKAVVTEKYEDDRRKSFKKIGSFSLEQLQEYADADLSVVEKLKEIIIQKVDEIYKVYGSSEKLFDADFVLEKSLKKNDAVVAIMKDLLDSVKSFENYIKAFFGEGKETNRDESFYGDFVLAYDILLKVDHIYDAIRNYVTQKPYSKDKFKLYFQNPQFMGGWDKDKETDYRATILRYGSKYYLAIMDKKYAKCLQKIDKDDVNGNYEKINYKLLPGPNKMLPKVFFSKKWMAYYNPSEDIQKIYKNGTFKKGDMFNLNDCHKLIDFFKDSISRYPKWSNAYDFNFSETEKYKDIAGFYREVEEQGYKVSFESASKKEVDKLVEEGKLYMFQIYNKDFSDKSHGTPNLHTMYFKLLFDENNHGQIRLSGGAELFMRRASLKKEELVVHPANSPIANKNPDNPKKTTTLSYDVYKDKRFSEDQYELHIPIAINKCPKNIFKINTEVRVLLKHDDNPYVIGIARGERNLLYIVVVDGKGNIVEQYSLNEIINNFNGIRIKTDYHSLLDKKEKERFEARQNWTSIENIKELKAGYISQVVHKICELVEKYDAVIALEDLNSGFKNSRVKVEKQVYQKFEKMLIDKLNYMVDKKSNPCATGGALKGYQITNKFESFKSMSTQNGFIFYIPAWLTSKIDPSTGFVNLLKTKYTSIADSKKFISSFDRIMYVPEEDLFEFALDYKNFSRTDADYIKKWKLYSYGNRIRIFRNPKKNNVFDWEEVCLTSAYKELFNKYGINYQQGDIRALLCEQSDKAFYSSFMALMSLMLQMRNSITGRTDVDFLISPVKNSDGIFYDSRNYEAQENAILPKNADANGAYNIARKVLWAIGQFKKAEDEKLDKVKIAISNKEWLEYAQTSVKHGGGGSGGGGSGGGGSGPKKKRKVAAAGSEELLSKNYHLENEVARLKKGSGSGGSGSGGSGSGSGGSGSGGSGSGEELLSKNYHLENEVARLKKGSGSGGSGSGGSGSGSGGSGSGGSGSGEELLSKNYHLENEVARLKKGSGSGGSGSGGSGSGSGGSGSGGSGSGEELLSKNYHLENEVARLKKGSGSGGSGSGGSGSGSGGSGSGGSGSGEELLSKNYHLENEVARLKKGSGSGGSGSGGSGSGSGGSGSGGSGSGEELLSKNYHLENEVARLKKGSGSGGSGSGGSGSGSGGSGSGGSGSGEELLSKNYHLENEVARLKKGSGSGGSGSGGSGSGSGGSGSGGSGSGEELLSKNYHLENEVARLKKSGGSKRTADGSEFEPKKKRKVGSG

SEQ ID NO: 476 - protein, 1789 aa, Synthetic construct
MKRTADGSEFESPKKKRKVSKLEKFTNCYSLSKTLRFKAIPVGKTQENIDNKRLLVEDEKRAEDYKGVKKLLDRYYLSFINDVLHSIKLKNLNNYISLFRKKTRTEKENKELENLEINLRKEIAKAFKGNEGYKSLFKKDIIETILPEFLDDKDEIALVNSFNGFTTAFTGFFDNRENMFSEEAKSTSIAFRCINENLTRYISNMDIFEKVDAIFDKHEVQEIKEKILNSDYDVEDFFEGEFFNFVLTQEGIDVYNAIIGGFVTESGEKIKGLNEYINLYNQKTKQKLPKFKPLYKQVLSDRESLSFYGGSSGENQTTQKGQKNSRERMKRIEEGIKELGSQILKEHPVENTQLQNEKLYLYYLQNGRDMYVDQELDINRLSDYDVDHIVPQSFLKDDSIDNKVLTRSDKNRGKSDNVPSEEVVKKMKNYWRQLLNAKLITQRKFDNLTKAERGGLSGSEGYTSDEEVLEVFRNTLNKNSEIFSSIKKLEKLFKNFDEYSSAGIFVKNGPAISTISKDIFGEWNVIRDKWNAEYDDIHLKKKAVVTEKYEDDRRKSFKKIGSFSLEQLQEYADADLSVVEKLKEIIIQKVDEIYKVYGSSEKLFDADFVLEKSLKKNDAVVAIMKDLLDSVKSFENYIKAFFGEGKETNRDESFYGDFVLAYDILLKVDHIYDAIRNYVTQKPYSKDKFKLYFQNPQFMGGWDKDKETDYRATILRYGSKYYLAIMDKKYAKCLQKIDKDDVNGNYEKINYKLLPGPNKMLPKVFFSKKWMAYYNPSEDIQKIYKNGTFKKGDMFNLNDCHKLIDFFKDSISRYPKWSNAYDFNFSETEKYKDIAGFYREVEEQGYKVSFESASKKEVDKLVEEGKLYMFQIYNKDFSDKSHGTPNLHTMYFKLLFDENNHGQIRLSGGAELFMRRASLKKEELVVHPANSPIANKNPDNPKKTTTLSYDVYKDKRFSEDQYELHIPIAINKCPKNIFKINTEVRVLLKHDDNPYVIGIARGERNLLYIVVVDGKGNIVEQYSLNEIINNFNGIRIKTDYHSLLDKKEKERFEARQNWTSIENIKELKAGYISQVVHKICELVEKYDAVIALEDLNSGFKNSRVKVEKQVYQKFEKMLIDKLNYMVDKKSNPCATGGALKGYQITNKFESFKSMSTQNGFIFYIPAWLTSKIDPSTGFVNLLKTKYTSIADSKKFISSFDRIMYVPEEDLFEFALDYKNFSRTDADYIKKWKLYSYGNRIRIFRNPKKNNVFDWEEVCLTSAYKELFNKYGINYQQGDIRALLCEQSDKAFYSSFMALMSLMLQMRNSITGRTDVDFLISPVKNSDGIFYDSRNYEAQENAILPKNADANGAYNIARKVLWAIGQFKKAEDEKLDKVKIAISNKEWLEYAQTSVKHGGGGSGGGGSGGGGSGPKKKRKVAAAGSEELLSKNYHLENEVARLKKGSGSGGSGSGGSGSGSGGSGSGGSGSGEELLSKNYHLENEVARLKKGSGSGGSGSGGSGSGSGGSGSGGSGSGEELLSKNYHLENEVARLKKGSGSGGSGSGGSGSGSGGSGSGGSGSGEELLSKNYHLENEVARLKKGSGSGGSGSGGSGSGSGGSGSGGSGSGEELLSKNYHLENEVARLKKGSGSGGSGSGGSGSGSGGSGSGGSGSGEELLSKNYHLENEVARLKKGSGSGGSGSGGSGSGSGGSGSGGSGSGEELLSKNYHLENEVARLKKGSGSGGSGSGGSGSGSGGSGSGGSGSGEELLSKNYHLENEVARLKKSGGSKRTADGSEFEPKKKRKVGSG

SEQ ID NO: 477 - protein, 1739 aa, Synthetic construct
MKRTADGSEFESPKKKRKVEASPASGPRHLMDPHIFTSNFNNGIGRHKTYLCYEVERLDNGTSVKMDQHRGFLHNQAKNLLCGFYGRHAELRFLDLVPSLQLDPAQIYRVTWFISWSPCFSWGCAGEVRAFLQENTHVRLRIFAARIYDYDPLYKEALQMLRDAGAQVSIMTYDEFKHCWDTFVDHQGCPFQPWDGLDEHSQALSGRLRAILQNQGNSTSQSDGSSVPADIDQSSDSDQSSSQGQPGSKLEKFTNCYSLSKTLRFKAIPVGKTQENIDNKRLLVEDEKRAEDYKGVKKLLDRYYLSFINDVLHSIKLKNLNNYISLFRKKTRTEKENKELENLEINLRKEIAKAFKGNEGYKSLFKKDIIETILPEFLDDKDEIALVNSFNGFTTAFTGFFDNRENMFSEEAKSTSIAFRCINENLTRYISNMDIFEKVDAIFDKHEVQEIKEKILNSDYDVEDFFEGEFFNFVLTQEGIDVYNAIIGGFVTESGEKIKGLNEYINLYNQKTKQKLPKFKPLYKQVLSDRESLSFYGEGSSGENQTTQKGQKNSRERMKRIEEGIKELGSQILKEHPVENTQLQNEKLYLYYLQNGRDMYVDQELDINRLSDYDVDHIVPQSFLKDDSIDNKVLTRSDKNRGKSDNVPSEEVVKKMKNYWRQLLNAKLITQRKFDNLTKAERGGLSGYTSDEEVLEVFRNTLNKNSEIFSSIKKLEKLFKNFDEYSSAGIFVKNGPAISTISKDIFGEWNVIRDKWNAEYDDIHLKKKAVVTEKYEDDRRKSFKKIGSFSLEQLQEYADADLSVVEKLKEIIIQKVDEIYKVYGSSEKLFDADFVLEKSLKKNDAVVAIMKDLLDSVKSFENYIKAFFGEGKETNRDESFYGDFVLAYDILLKVDHIYDAIRNYVTQKPYSKDKFKLYFQNPQFMGGWDKDKETDYRATILRYGSKYYLAIMDKKYAKCLQKIDKDDVNGNYEKINYKLLPGPNKMLPKVFFSKKWMAYYNPSEDIQKIYKNGTFKKGDMFNLNDCHKLIDFFKDSISRYPKWSNAYDFNFSETEKYKDIAGFYREVEEQGYKVSFESASKKEVDKLVEEGKLYMFQIYNKDFSDKSHGTPNLHTMYFKLLFDENNHGQIRLSGGAELFMRRASLKKEELVVHPANSPIANKNPDNPKKTTTLSYDVYKDKRFSEDQYELHIPIAINKCPKNIFKINTEVRVLLKHDDNPYVIGIARGERNLLYIVVVDGKGNIVEQYSLNEIINNFNGIRIKTDYHSLLDKKEKERFEARQNWTSIENIKELKAGYISQVVHKICELVEKYDAVIALEDLNSGFKNSRVKVEKQVYQKFEKMLIDKLNYMVDKKSNPCATGGALKGYQITNKFESFKSMSTQNGFIFYIPAWLTSKIDPSTGFVNLLKTKYTSIADSKKFISSFDRIMYVPEEDLFEFALDYKNFSRTDADYIKKWKLYSYGNRIRIFRNPKKNNVFDWEEVCLTSAYKELFNKYGINYQQGDIRALLCEQSDKAFYSSFMALMSLMLQMRNSITGRTDVDFLISPVKNSDGIFYDSRNYEAQENAILPKNADANGAYNIARKVLWAIGQFKKAEDEKLDKVKIAISNKEWLEYAQTSVKHSGGSGGSGGSTNLSDIIEKETGKQLVIQESILMLPEEVEEVIGNKPESDILVHTAYDESTDENVMLLTSDAPEYKPWALVIQDSNGENKIKMLSGGSKRTADGSEFEPKKKRKVGSG

SEQ ID NO: 478 - protein, 1739 aa, Synthetic construct
MKRTADGSEFESPKKKRKVEASPASGPRHLMDPHIFTSNFNNGIGRHKTYLCYEVERLDNGTSVKMDQHRGFLHNQAKNLLCGFYGRHAELRFLDLVPSLQLDPAQIYRVTWFISWSPCFSWGCAGEVRAFLQENTHVRLRIFAARIYDYDPLYKEALQMLRDAGAQVSIMTYDEFKHCWDTFVDHQGCPFQPWDGLDEHSQALSGRLRAILQNQGNSTSQSDGSSVPADIDQSSDSDQSSSQGQPGSKLEKFTNCYSLSKTLRFKAIPVGKTQENIDNKRLLVEDEKRAEDYKGVKKLLDRYYLSFINDVLHSIKLKNLNNYISLFRKKTRTEKENKELENLEINLRKEIAKAFKGNEGYKSLFKKDIIETILPEFLDDKDEIALVNSFNGFTTAFTGFFDNRENMFSEEAKSTSIAFRCINENLTRYISNMDIFEKVDAIFDKHEVQEIKEKILNSDYDVEDFFEGEFFNFVLTQEGIDVYNAIIGGFVTESGEKIKGLNEYINLYNQKTKQKLPKFKPLYKQVLSDRESLSFYGGSSGENQTTQKGQKNSRERMKRIEEGIKELGSQILKEHPVENTQLQNEKLYLYYLQNGRDMYVDQELDINRLSDYDVDHIVPQSFLKDDSIDNKVLTRSDKNRGKSDNVPSEEVVKKMKNYWRQLLNAKLITQRKFDNLTKAERGGLSEGYTSDEEVLEVFRNTLNKNSEIFSSIKKLEKLFKNFDEYSSAGIFVKNGPAISTISKDIFGEWNVIRDKWNAEYDDIHLKKKAVVTEKYEDDRRKSFKKIGSFSLEQLQEYADADLSVVEKLKEIIIQKVDEIYKVYGSSEKLFDADFVLEKSLKKNDAVVAIMKDLLDSVKSFENYIKAFFGEGKETNRDESFYGDFVLAYDILLKVDHIYDAIRNYVTQKPYSKDKFKLYFQNPQFMGGWDKDKETDYRATILRYGSKYYLAIMDKKYAKCLQKIDKDDVNGNYEKINYKLLPGPNKMLPKVFFSKKWMAYYNPSEDIQKIYKNGTFKKGDMFNLNDCHKLIDFFKDSISRYPKWSNAYDFNFSETEKYKDIAGFYREVEEQGYKVSFESASKKEVDKLVEEGKLYMFQIYNKDFSDKSHGTPNLHTMYFKLLFDENNHGQIRLSGGAELFMRRASLKKEELVVHPANSPIANKNPDNPKKTTTLSYDVYKDKRFSEDQYELHIPIAINKCPKNIFKINTEVRVLLKHDDNPYVIGIARGERNLLYIVVVDGKGNIVEQYSLNEIINNFNGIRIKTDYHSLLDKKEKERFEARQNWTSIENIKELKAGYISQVVHKICELVEKYDAVIALEDLNSGFKNSRVKVEKQVYQKFEKMLIDKLNYMVDKKSNPCATGGALKGYQITNKFESFKSMSTQNGFIFYIPAWLTSKIDPSTGFVNLLKTKYTSIADSKKFISSFDRIMYVPEEDLFEFALDYKNFSRTDADYIKKWKLYSYGNRIRIFRNPKKNNVFDWEEVCLTSAYKELFNKYGINYQQGDIRALLCEQSDKAFYSSFMALMSLMLQMRNSITGRTDVDFLISPVKNSDGIFYDSRNYEAQENAILPKNADANGAYNIARKVLWAIGQFKKAEDEKLDKVKIAISNKEWLEYAQTSVKHSGGSGGSGGSTNLSDIIEKETGKQLVIQESILMLPEEVEEVIGNKPESDILVHTAYDESTDENVMLLTSDAPEYKPWALVIQDSNGENKIKMLSGGSKRTADGSEFEPKKKRKVGSG

SEQ ID NO: 479 - protein, 1741 aa, Synthetic construct
MKRTADGSEFESPKKKRKVEASPASGPRHLMDPHIFTSNFNNGIGRHKTYLCYEVERLDNGTSVKMDQHRGFLHNQAKNLLCGFYGRHAELRFLDLVPSLQLDPAQIYRVTWFISWSPCFSWGCAGEVRAFLQENTHVRLRIFAARIYDYDPLYKEALQMLRDAGAQVSIMTYDEFKHCWDTFVDHQGCPFQPWDGLDEHSQALSGRLRAILQNQGNSTSQSDGSSVPADIDQSSDSDQSSSQGQPGSKLEKFTNCYSLSKTLRFKAIPVGKTQENIDNKRLLVEDEKRAEDYKGVKKLLDRYYLSFINDVLHSIKLKNLNNYISLFRKKTRTEKENKELENLEINLRKEIAKAFKGNEGYKSLFKKDIIETILPEFLDDKDEIALVNSFNGFTTAFTGFFDNRENMFSEEAKSTSIAFRCINENLTRYISNMDIFEKVDAIFDKHEVQEIKEKILNSDYDVEDFFEGEFFNFVLTQEGIDVYNAIIGGFVTESGEKIKGLNEYINLYNQKTKQKLPKFKPLYKQVLSDRESLSFYGGSSGENQTTQKGQKNSRERMKRIEEGIKELGSQILKEHPVENTQLQNEKLYLYYLQNGRDMYVDQELDINRLSDYDVDHIVPQSFLKDDSIDNKVLTRSDKNRGKSDNVPSEEVVKKMKNYWRQLLNAKLITQRKFDNLTKAERGGLSGSEGYTSDEEVLEVFRNTLNKNSEIFSSIKKLEKLFKNFDEYSSAGIFVKNGPAISTISKDIFGEWNVIRDKWNAEYDDIHLKKKAVVTEKYEDDRRKSFKKIGSFSLEQLQEYADADLSVVEKLKEIIIQKVDEIYKVYGSSEKLFDADFVLEKSLKKNDAVVAIMKDLLDSVKSFENYIKAFFGEGKETNRDESFYGDFVLAYDILLKVDHIYDAIRNYVTQKPYSKDKFKLYFQNPQFMGGWDKDKETDYRATILRYGSKYYLAIMDKKYAKCLQKIDKDDVNGNYEKINYKLLPGPNKMLPKVFFSKKWMAYYNPSEDIQKIYKNGTFKKGDMFNLNDCHKLIDFFKDSISRYPKWSNAYDFNFSETEKYKDIAGFYREVEEQGYKVSFESASKKEVDKLVEEGKLYMFQIYNKDFSDKSHGTPNLHTMYFKLLFDENNHGQIRLSGGAELFMRRASLKKEELVVHPANSPIANKNPDNPKKTTTLSYDVYKDKRFSEDQYELHIPIAINKCPKNIFKINTEVRVLLKHDDNPYVIGIARGERNLLYIVVVDGKGNIVEQYSLNEIINNFNGIRIKTDYHSLLDKKEKERFEARQNWTSIENIKELKAGYISQVVHKICELVEKYDAVIALEDLNSGFKNSRVKVEKQVYQKFEKMLIDKLNYMVDKKSNPCATGGALKGYQITNKFESFKSMSTQNGFIFYIPAWLTSKIDPSTGFVNLLKTKYTSIADSKKFISSFDRIMYVPEEDLFEFALDYKNFSRTDADYIKKWKLYSYGNRIRIFRNPKKNNVFDWEEVCLTSAYKELFNKYGINYQQGDIRALLCEQSDKAFYSSFMALMSLMLQMRNSITGRTDVDFLISPVKNSDGIFYDSRNYEAQENAILPKNADANGAYNIARKVLWAIGQFKKAEDEKLDKVKIAISNKEWLEYAQTSVKHSGGSGGSGGSTNLSDIIEKETGKQLVIQESILMLPEEVEEVIGNKPESDILVHTAYDESTDENVMLLTSDAPEYKPWALVIQDSNGENKIKMLSGGSKRTADGSEFEPKKKRKVGSG

SEQ ID NO: 480 - protein, 1734 aa, Synthetic construct
MKRTADGSEFESPKKKRKVMEASPASGPRHLMDPHIFTSNFNNGIGRHKTYLCYEVERLDNGTSVKMDQHRGFLHNQAKNLLCGFYGRHAELRFLDLVPSLQLDPAQIYRVTWFISWSPCFSWGCAGEVRAFLQENTHVRLRIFAARIYDYDPLYKEALQMLRDAGAQVSIMTYDEFKHCWDTFVDHQGCPFQPWDGLDEHSQALSGRLRAILQNQGNSGSETPGTSESATPESMSKLEKFTNCYSLSKTLRFKAIPVGKTQENIDNKRLLVEDEKRAEDYKGVKKLLDRYYLSFINDVLHSIKLKNLNNYISLFRKKTRTEKENKELENLEINLRKEIAKAFKGNEGYKSLFKKDIIETILPEFLDDKDEIALVNSFNGFTTAFTGFFDNRENMFSEEAKSTSIAFRCINENLTRYISNMDIFEKVDAIFDKHEVQEIKEKILNSDYDVEDFFEGEFFNFVLTQEGIDVYNAIIGGFVTESGEKIKGLNEYINLYNQKTKQKLPKFKPLYKQVLSDRESLSFYGEGSSGENQTTQKGQKNSRERMKRIEEGIKELGSQILKEHPVENTQLQNEKLYLYYLQNGRDMYVDQELDINRLSDYDVDHIVPQSFLKDDSIDNKVLTRSDKNRGKSDNVPSEEVVKKMKNYWRQLLNAKLITQRKFDNLTKAERGGLSGYTSDEEVLEVFRNTLNKNSEIFSSIKKLEKLFKNFDEYSSAGIFVKNGPAISTISKDIFGEWNVIRDKWNAEYDDIHLKKKAVVTEKYEDDRRKSFKKIGSFSLEQLQEYADADLSVVEKLKEIIIQKVDEIYKVYGSSEKLFDADFVLEKSLKKNDAVVAIMKDLLDSVKSFENYIKAFFGEGKETNRDESFYGDFVLAYDILLKVDHIYDAIRNYVTQKPYSKDKFKLYFQNPQFMGGWDKDKETDYRATILRYGSKYYLAIMDKKYAKCLQKIDKDDVNGNYEKINYKLLPGPNKMLPKVFFSKKWMAYYNPSEDIQKIYKNGTFKKGDMFNLNDCHKLIDFFKDSISRYPKWSNAYDFNFSETEKYKDIAGFYREVEEQGYKVSFESASKKEVDKLVEEGKLYMFQIYNKDFSDKSHGTPNLHTMYFKLLFDENNHGQIRLSGGAELFMRRASLKKEELVVHPANSPIANKNPDNPKKTTTLSYDVYKDKRFSEDQYELHIPIAINKCPKNIFKINTEVRVLLKHDDNPYVIGIARGERNLLYIVVVDGKGNIVEQYSLNEIINNFNGIRIKTDYHSLLDKKEKERFEARQNWTSIENIKELKAGYISQVVHKICELVEKYDAVIALEDLNSGFKNSRVKVEKQVYQKFEKMLIDKLNYMVDKKSNPCATGGALKGYQITNKFESFKSMSTQNGFIFYIPAWLTSKIDPSTGFVNLLKTKYTSIADSKKFISSFDRIMYVPEEDLFEFALDYKNFSRTDADYIKKWKLYSYGNRIRIFRNPKKNNVFDWEEVCLTSAYKELFNKYGINYQQGDIRALLCEQSDKAFYSSFMALMSLMLQMRNSITGRTDVDFLISPVKNSDGIFYDSRNYEAQENAILPKNADANGAYNIARKVLWAIGQFKKAEDEKLDKVKIAISNKEWLEYAQTSVKHGSPKKKRKVSGGSTNLSDIIEKETGKQLVIQESILMLPEEVEEVIGNKPESDILVHTAYDESTDENVMLLTSDAPEYKPWALVIQDSNGENKIKMLTKYDSGGSKRTADGSEFEPKKKRKVGSG

SEQ ID NO: 481 - protein, 1734 aa, Synthetic construct
MKRTADGSEFESPKKKRKVMEASPASGPRHLMDPHIFTSNFNNGIGRHKTYLCYEVERLDNGTSVKMDQHRGFLHNQAKNLLCGFYGRHAELRFLDLVPSLQLDPAQIYRVTWFISWSPCFSWGCAGEVRAFLQENTHVRLRIFAARIYDYDPLYKEALQMLRDAGAQVSIMTYDEFKHCWDTFVDHQGCPFQPWDGLDEHSQALSGRLRAILQNQGNSGSETPGTSESATPESMSKLEKFTNCYSLSKTLRFKAIPVGKTQENIDNKRLLVEDEKRAEDYKGVKKLLDRYYLSFINDVLHSIKLKNLNNYISLFRKKTRTEKENKELENLEINLRKEIAKAFKGNEGYKSLFKKDIIETILPEFLDDKDEIALVNSFNGFTTAFTGFFDNRENMFSEEAKSTSIAFRCINENLTRYISNMDIFEKVDAIFDKHEVQEIKEKILNSDYDVEDFFEGEFFNFVLTQEGIDVYNAIIGGFVTESGEKIKGLNEYINLYNQKTKQKLPKFKPLYKQVLSDRESLSFYGGSSGENQTTQKGQKNSRERMKRIEEGIKELGSQILKEHPVENTQLQNEKLYLYYLQNGRDMYVDQELDINRLSDYDVDHIVPQSFLKDDSIDNKVLTRSDKNRGKSDNVPSEEVVKKMKNYWRQLLNAKLITQRKFDNLTKAERGGLSEGYTSDEEVLEVFRNTLNKNSEIFSSIKKLEKLFKNFDEYSSAGIFVKNGPAISTISKDIFGEWNVIRDKWNAEYDDIHLKKKAVVTEKYEDDRRKSFKKIGSFSLEQLQEYADADLSVVEKLKEIIIQKVDEIYKVYGSSEKLFDADFVLEKSLKKNDAVVAIMKDLLDSVKSFENYIKAFFGEGKETNRDESFYGDFVLAYDILLKVDHIYDAIRNYVTQKPYSKDKFKLYFQNPQFMGGWDKDKETDYRATILRYGSKYYLAIMDKKYAKCLQKIDKDDVNGNYEKINYKLLPGPNKMLPKVFFSKKWMAYYNPSEDIQKIYKNGTFKKGDMFNLNDCHKLIDFFKDSISRYPKWSNAYDFNFSETEKYKDIAGFYREVEEQGYKVSFESASKKEVDKLVEEGKLYMFQIYNKDFSDKSHGTPNLHTMYFKLLFDENNHGQIRLSGGAELFMRRASLKKEELVVHPANSPIANKNPDNPKKTTTLSYDVYKDKRFSEDQYELHIPIAINKCPKNIFKINTEVRVLLKHDDNPYVIGIARGERNLLYIVVVDGKGNIVEQYSLNEIINNFNGIRIKTDYHSLLDKKEKERFEARQNWTSIENIKELKAGYISQVVHKICELVEKYDAVIALEDLNSGFKNSRVKVEKQVYQKFEKMLIDKLNYMVDKKSNPCATGGALKGYQITNKFESFKSMSTQNGFIFYIPAWLTSKIDPSTGFVNLLKTKYTSIADSKKFISSFDRIMYVPEEDLFEFALDYKNFSRTDADYIKKWKLYSYGNRIRIFRNPKKNNVFDWEEVCLTSAYKELFNKYGINYQQGDIRALLCEQSDKAFYSSFMALMSLMLQMRNSITGRTDVDFLISPVKNSDGIFYDSRNYEAQENAILPKNADANGAYNIARKVLWAIGQFKKAEDEKLDKVKIAISNKEWLEYAQTSVKHGSPKKKRKVSGGSTNLSDIIEKETGKQLVIQESILMLPEEVEEVIGNKPESDILVHTAYDESTDENVMLLTSDAPEYKPWALVIQDSNGENKIKMLTKYDSGGSKRTADGSEFEPKKKRKVGSG

SEQ ID NO: 482 - protein, 1736 aa, Synthetic construct
MKRTADGSEFESPKKKRKVMEASPASGPRHLMDPHIFTSNFNNGIGRHKTYLCYEVERLDNGTSVKMDQHRGFLHNQAKNLLCGFYGRHAELRFLDLVPSLQLDPAQIYRVTWFISWSPCFSWGCAGEVRAFLQENTHVRLRIFAARIYDYDPLYKEALQMLRDAGAQVSIMTYDEFKHCWDTFVDHQGCPFQPWDGLDEHSQALSGRLRAILQNQGNSGSETPGTSESATPESMSKLEKFTNCYSLSKTLRFKAIPVGKTQENIDNKRLLVEDEKRAEDYKGVKKLLDRYYLSFINDVLHSIKLKNLNNYISLFRKKTRTEKENKELENLEINLRKEIAKAFKGNEGYKSLFKKDIIETILPEFLDDKDEIALVNSFNGFTTAFTGFFDNRENMFSEEAKSTSIAFRCINENLTRYISNMDIFEKVDAIFDKHEVQEIKEKILNSDYDVEDFFEGEFFNFVLTQEGIDVYNAIIGGFVTESGEKIKGLNEYINLYNQKTKQKLPKFKPLYKQVLSDRESLSFYGGSSGENQTTQKGQKNSRERMKRIEEGIKELGSQILKEHPVENTQLQNEKLYLYYLQNGRDMYVDQELDINRLSDYDVDHIVPQSFLKDDSIDNKVLTRSDKNRGKSDNVPSEEVVKKMKNYWRQLLNAKLITQRKFDNLTKAERGGLSGSEGYTSDEEVLEVFRNTLNKNSEIFSSIKKLEKLFKNFDEYSSAGIFVKNGPAISTISKDIFGEWNVIRDKWNAEYDDIHLKKKAVVTEKYEDDRRKSFKKIGSFSLEQLQEYADADLSVVEKLKEIIIQKVDEIYKVYGSSEKLFDADFVLEKSLKKNDAVVAIMKDLLDSVKSFENYIKAFFGEGKETNRDESFYGDFVLAYDILLKVDHIYDAIRNYVTQKPYSKDKFKLYFQNPQFMGGWDKDKETDYRATILRYGSKYYLAIMDKKYAKCLQKIDKDDVNGNYEKINYKLLPGPNKMLPKVFFSKKWMAYYNPSEDIQKIYKNGTFKKGDMFNLNDCHKLIDFFKDSISRYPKWSNAYDFNFSETEKYKDIAGFYREVEEQGYKVSFESASKKEVDKLVEEGKLYMFQIYNKDFSDKSHGTPNLHTMYFKLLFDENNHGQIRLSGGAELFMRRASLKKEELVVHPANSPIANKNPDNPKKTTTLSYDVYKDKRFSEDQYELHIPIAINKCPKNIFKINTEVRVLLKHDDNPYVIGIARGERNLLYIVVVDGKGNIVEQYSLNEIINNFNGIRIKTDYHSLLDKKEKERFEARQNWTSIENIKELKAGYISQVVHKICELVEKYDAVIALEDLNSGFKNSRVKVEKQVYQKFEKMLIDKLNYMVDKKSNPCATGGALKGYQITNKFESFKSMSTQNGFIFYIPAWLTSKIDPSTGFVNLLKTKYTSIADSKKFISSFDRIMYVPEEDLFEFALDYKNFSRTDADYIKKWKLYSYGNRIRIFRNPKKNNVFDWEEVCLTSAYKELFNKYGINYQQGDIRALLCEQSDKAFYSSFMALMSLMLQMRNSITGRTDVDFLISPVKNSDGIFYDSRNYEAQENAILPKNADANGAYNIARKVLWAIGQFKKAEDEKLDKVKIAISNKEWLEYAQTSVKHGSPKKKRKVSGGSTNLSDIIEKETGKQLVIQESILMLPEEVEEVIGNKPESDILVHTAYDESTDENVMLLTSDAPEYKPWALVIQDSNGENKIKMLTKYDSGGSKRTADGSEFEPKKKRKVGSG

SEQ ID NO: 483 - protein, 1616 aa, Synthetic construct
MKRTADGSEFESPKKKRKVSEVEFSHEYWMRHALTLAKRARDEREVPVGAVLVLNNRVIGEGWNRAIGLHDPTAHAEIMALRQGGLVMQNYRLIDATLYVTFEPCVMCAGAMIHSRIGRVVFGVRNSKRGAAGSLMNVLNYPGMNHRVEITEGILADECAALLCDFYRMPRQVFNAQKKAQSSINSGGSSGGSSGSETPGTSESATPESSGGSSGGSSKLEKFTNCYSLSKTLRFKAIPVGKTQENIDNKRLLVEDEKRAEDYKGVKKLLDRYYLSFINDVLHSIKLKNLNNYISLFRKKTRTEKENKELENLEINLRKEIAKAFKGNEGYKSLFKKDIIETILPEFLDDKDEIALVNSFNGFTTAFTGFFDNRENMFSEEAKSTSIAFRCINENLTRYISNMDIFEKVDAIFDKHEVQEIKEKILNSDYDVEDFFEGEFFNFVLTQEGIDVYNAIIGGFVTESGEKIKGLNEYINLYNQKTKQKLPKFKPLYKQVLSDRESLSFYGEGSSGENQTTQKGQKNSRERMKRIEEGIKELGSQILKEHPVENTQLQNEKLYLYYLQNGRDMYVDQELDINRLSDYDVDHIVPQSFLKDDSIDNKVLTRSDKNRGKSDNVPSEEVVKKMKNYWRQLLNAKLITQRKFDNLTKAERGGLSGYTSDEEVLEVFRNTLNKNSEIFSSIKKLEKLFKNFDEYSSAGIFVKNGPAISTISKDIFGEWNVIRDKWNAEYDDIHLKKKAVVTEKYEDDRRKSFKKIGSFSLEQLQEYADADLSVVEKLKEIIIQKVDEIYKVYGSSEKLFDADFVLEKSLKKNDAVVAIMKDLLDSVKSFENYIKAFFGEGKETNRDESFYGDFVLAYDILLKVDHIYDAIRNYVTQKPYSKDKFKLYFQNPQFMGGWDKDKETDYRATILRYGSKYYLAIMDKKYAKCLQKIDKDDVNGNYEKINYKLLPGPNKMLPKVFFSKKWMAYYNPSEDIQKIYKNGTFKKGDMFNLNDCHKLIDFFKDSISRYPKWSNAYDFNFSETEKYKDIAGFYREVEEQGYKVSFESASKKEVDKLVEEGKLYMFQIYNKDFSDKSHGTPNLHTMYFKLLFDENNHGQIRLSGGAELFMRRASLKKEELVVHPANSPIANKNPDNPKKTTTLSYDVYKDKRFSEDQYELHIPIAINKCPKNIFKINTEVRVLLKHDDNPYVIGIARGERNLLYIVVVDGKGNIVEQYSLNEIINNFNGIRIKTDYHSLLDKKEKERFEARQNWTSIENIKELKAGYISQVVHKICELVEKYDAVIALEDLNSGFKNSRVKVEKQVYQKFEKMLIDKLNYMVDKKSNPCATGGALKGYQITNKFESFKSMSTQNGFIFYIPAWLTSKIDPSTGFVNLLKTKYTSIADSKKFISSFDRIMYVPEEDLFEFALDYKNFSRTDADYIKKWKLYSYGNRIRIFRNPKKNNVFDWEEVCLTSAYKELFNKYGINYQQGDIRALLCEQSDKAFYSSFMALMSLMLQMRNSITGRTDVDFLISPVKNSDGIFYDSRNYEAQENAILPKNADANGAYNIARKVLWAIGQFKKAEDEKLDKVKIAISNKEWLEYAQTSVKHSGGSKRTADGSEFEPKKKRKVGSG

SEQ ID NO: 484 - protein, 1616 aa, Synthetic construct
MKRTADGSEFESPKKKRKVSEVEFSHEYWMRHALTLAKRARDEREVPVGAVLVLNNRVIGEGWNRAIGLHDPTAHAEIMALRQGGLVMQNYRLIDATLYVTFEPCVMCAGAMIHSRIGRVVFGVRNSKRGAAGSLMNVLNYPGMNHRVEITEGILADECAALLCDFYRMPRQVFNAQKKAQSSINSGGSSGGSSGSETPGTSESATPESSGGSSGGSSKLEKFTNCYSLSKTLRFKAIPVGKTQENIDNKRLLVEDEKRAEDYKGVKKLLDRYYLSFINDVLHSIKLKNLNNYISLFRKKTRTEKENKELENLEINLRKEIAKAFKGNEGYKSLFKKDIIETILPEFLDDKDEIALVNSFNGFTTAFTGFFDNRENMFSEEAKSTSIAFRCINENLTRYISNMDIFEKVDAIFDKHEVQEIKEKILNSDYDVEDFFEGEFFNFVLTQEGIDVYNAIIGGFVTESGEKIKGLNEYINLYNQKTKQKLPKFKPLYKQVLSDRESLSFYGGSSGENQTTQKGQKNSRERMKRIEEGIKELGSQILKEHPVENTQLQNEKLYLYYLQNGRDMYVDQELDINRLSDYDVDHIVPQSFLKDDSIDNKVLTRSDKNRGKSDNVPSEEVVKKMKNYWRQLLNAKLITQRKFDNLTKAERGGLSEGYTSDEEVLEVFRNTLNKNSEIFSSIKKLEKLFKNFDEYSSAGIFVKNGPAISTISKDIFGEWNVIRDKWNAEYDDIHLKKKAVVTEKYEDDRRKSFKKIGSFSLEQLQEYADADLSVVEKLKEIIIQKVDEIYKVYGSSEKLFDADFVLEKSLKKNDAVVAIMKDLLDSVKSFENYIKAFFGEGKETNRDESFYGDFVLAYDILLKVDHIYDAIRNYVTQKPYSKDKFKLYFQNPQFMGGWDKDKETDYRATILRYGSKYYLAIMDKKYAKCLQKIDKDDVNGNYEKINYKLLPGPNKMLPKVFFSKKWMAYYNPSEDIQKIYKNGTFKKGDMFNLNDCHKLIDFFKDSISRYPKWSNAYDFNFSETEKYKDIAGFYREVEEQGYKVSFESASKKEVDKLVEEGKLYMFQIYNKDFSDKSHGTPNLHTMYFKLLFDENNHGQIRLSGGAELFMRRASLKKEELVVHPANSPIANKNPDNPKKTTTLSYDVYKDKRFSEDQYELHIPIAINKCPKNIFKINTEVRVLLKHDDNPYVIGIARGERNLLYIVVVDGKGNIVEQYSLNEIINNFNGIRIKTDYHSLLDKKEKERFEARQNWTSIENIKELKAGYISQVVHKICELVEKYDAVIALEDLNSGFKNSRVKVEKQVYQKFEKMLIDKLNYMVDKKSNPCATGGALKGYQITNKFESFKSMSTQNGFIFYIPAWLTSKIDPSTGFVNLLKTKYTSIADSKKFISSFDRIMYVPEEDLFEFALDYKNFSRTDADYIKKWKLYSYGNRIRIFRNPKKNNVFDWEEVCLTSAYKELFNKYGINYQQGDIRALLCEQSDKAFYSSFMALMSLMLQMRNSITGRTDVDFLISPVKNSDGIFYDSRNYEAQENAILPKNADANGAYNIARKVLWAIGQFKKAEDEKLDKVKIAISNKEWLEYAQTSVKHSGGSKRTADGSEFEPKKKRKVGSG

SEQ ID NO: 485 - protein, 1618 aa, Synthetic construct
MKRTADGSEFESPKKKRKVSEVEFSHEYWMRHALTLAKRARDEREVPVGAVLVLNNRVIGEGWNRAIGLHDPTAHAEIMALRQGGLVMQNYRLIDATLYVTFEPCVMCAGAMIHSRIGRVVFGVRNSKRGAAGSLMNVLNYPGMNHRVEITEGILADECAALLCDFYRMPRQVFNAQKKAQSSINSGGSSGGSSGSETPGTSESATPESSGGSSGGSSKLEKFTNCYSLSKTLRFKAIPVGKTQENIDNKRLLVEDEKRAEDYKGVKKLLDRYYLSFINDVLHSIKLKNLNNYISLFRKKTRTEKENKELENLEINLRKEIAKAFKGNEGYKSLFKKDIIETILPEFLDDKDEIALVNSFNGFTTAFTGFFDNRENMFSEEAKSTSIAFRCINENLTRYISNMDIFEKVDAIFDKHEVQEIKEKILNSDYDVEDFFEGEFFNFVLTQEGIDVYNAIIGGFVTESGEKIKGLNEYINLYNQKTKQKLPKFKPLYKQVLSDRESLSFYGGSSGENQTTQKGQKNSRERMKRIEEGIKELGSQILKEHPVENTQLQNEKLYLYYLQNGRDMYVDQELDINRLSDYDVDHIVPQSFLKDDSIDNKVLTRSDKNRGKSDNVPSEEVVKKMKNYWRQLLNAKLITQRKFDNLTKAERGGLSGSEGYTSDEEVLEVFRNTLNKNSEIFSSIKKLEKLFKNFDEYSSAGIFVKNGPAISTISKDIFGEWNVIRDKWNAEYDDIHLKKKAVVTEKYEDDRRKSFKKIGSFSLEQLQEYADADLSVVEKLKEIIIQKVDEIYKVYGSSEKLFDADFVLEKSLKKNDAVVAIMKDLLDSVKSFENYIKAFFGEGKETNRDESFYGDFVLAYDILLKVDHIYDAIRNYVTQKPYSKDKFKLYFQNPQFMGGWDKDKETDYRATILRYGSKYYLAIMDKKYAKCLQKIDKDDVNGNYEKINYKLLPGPNKMLPKVFFSKKWMAYYNPSEDIQKIYKNGTFKKGDMFNLNDCHKLIDFFKDSISRYPKWSNAYDFNFSETEKYKDIAGFYREVEEQGYKVSFESASKKEVDKLVEEGKLYMFQIYNKDFSDKSHGTPNLHTMYFKLLFDENNHGQIRLSGGAELFMRRASLKKEELVVHPANSPIANKNPDNPKKTTTLSYDVYKDKRFSEDQYELHIPIAINKCPKNIFKINTEVRVLLKHDDNPYVIGIARGERNLLYIVVVDGKGNIVEQYSLNEIINNFNGIRIKTDYHSLLDKKEKERFEARQNWTSIENIKELKAGYISQVVHKICELVEKYDAVIALEDLNSGFKNSRVKVEKQVYQKFEKMLIDKLNYMVDKKSNPCATGGALKGYQITNKFESFKSMSTQNGFIFYIPAWLTSKIDPSTGFVNLLKTKYTSIADSKKFISSFDRIMYVPEEDLFEFALDYKNFSRTDADYIKKWKLYSYGNRIRIFRNPKKNNVFDWEEVCLTSAYKELFNKYGINYQQGDIRALLCEQSDKAFYSSFMALMSLMLQMRNSITGRTDVDFLISPVKNSDGIFYDSRNYEAQENAILPKNADANGAYNIARKVLWAIGQFKKAEDEKLDKVKIAISNKEWLEYAQTSVKHSGGSKRTADGSEFEPKKKRKVGSG

SEQ ID NO: 486 - protein, 1373 aa, Synthetic construct
MGSKLEKFTNCYSLSKTLRFKAIPVGKTQENIDNKRLLVEDEKRAEDYKGVKKLLDRYYLSFINDVLHSIKLKNLNNYISLFRKKTRTEKENKELENLEINLRKEIAKAFKGNEGYKSLFKKDIIETILPEFLDDKDEIALVNSFNGFTTAFTGFFDNRENMFSEEAKSTSIAFRCINENLTRYISNMDIFEKVDAIFDKHEVQEIKEKILNSDYDVEDFFEGEFFNFVLTQEGIDVYNAIIGGFVTESGEKIKGLNEYINLYNQKTKQKLPKFKPLYKQVLSDRESLSFYGENQTTQKGQKNSRERMKRIEEGIKELGSQILKEHPVENTQLQNEKLYLYYLQNGRDMYVDQELDINRLSDYDVDHIVPQSFLKDDSIDNKVLTRSDKNRGKSDNVPSEEVVKKMKNYWRQLLNAKLITQRKFDNLTKAERGGLSEGYTSDEEVLEVFRNTLNKNSEIFSSIKKLEKLFKNFDEYSSAGIFVKNGPAISTISKDIFGEWNVIRDKWNAEYDDIHLKKKAVVTEKYEDDRRKSFKKIGSFSLEQLQEYADADLSVVEKLKEIIIQKVDEIYKVYGSSEKLFDADFVLEKSLKKNDAVVAIMKDLLDSVKSFENYIKAFFGEGKETNRDESFYGDFVLAYDILLKVDHIYDAIRNYVTQKPYSKDKFKLYFQNPQFMGGWDKDKETDYRATILRYGSKYYLAIMDKKYAKCLQKIDKDDVNGNYEKINYKLLPGPNKMLPKVFFSKKWMAYYNPSEDIQKIYKNGTFKKGDMFNLNDCHKLIDFFKDSISRYPKWSNAYDFNFSETEKYKDIAGFYREVEEQGYKVSFESASKKEVDKLVEEGKLYMFQIYNKDFSDKSHGTPNLHTMYFKLLFDENNHGQIRLSGGAELFMRRASLKKEELVVHPANSPIANKNPDNPKKTTTLSYDVYKDKRFSEDQYELHIPIAINKCPKNIFKINTEVRVLLKHDDNPYVIGIARGERNLLYIVVVDGKGNIVEQYSLNEIINNFNGIRIKTDYHSLLDKKEKERFEARQNWTSIENIKELKAGYISQVVHKICELVEKYDAVIALEDLNSGFKNSRVKVEKQVYQKFEKMLIDKLNYMVDKKSNPCATGGALKGYQITNKFESFKSMSTQNGFIFYIPAWLTSKIDPSTGFVNLLKTKYTSIADSKKFISSFDRIMYVPEEDLFEFALDYKNFSRTDADYIKKWKLYSYGNRIRIFRNPKKNNVFDWEEVCLTSAYKELFNKYGINYQQGDIRALLCEQSDKAFYSSFMALMSLMLQMRNSITGRTDVDFLISPVKNSDGIFYDSRNYEAQENAILPKNADANGAYNIARKVLWAIGQFKKAEDEKLDKVKIAISNKEWLEYAQTSVKH

SEQ ID NO: 487 - protein, 1375 aa, Synthetic construct
MGSKLEKFTNCYSLSKTLRFKAIPVGKTQENIDNKRLLVEDEKRAEDYKGVKKLLDRYYLSFINDVLHSIKLKNLNNYISLFRKKTRTEKENKELENLEINLRKEIAKAFKGNEGYKSLFKKDIIETILPEFLDDKDEIALVNSFNGFTTAFTGFFDNRENMFSEEAKSTSIAFRCINENLTRYISNMDIFEKVDAIFDKHEVQEIKEKILNSDYDVEDFFEGEFFNFVLTQEGIDVYNAIIGGFVTESGEKIKGLNEYINLYNQKTKQKLPKFKPLYKQVLSDRESLSFYGSGENQTTQKGQKNSRERMKRIEEGIKELGSQILKEHPVENTQLQNEKLYLYYLQNGRDMYVDQELDINRLSDYDVDHIVPQSFLKDDSIDNKVLTRSDKNRGKSDNVPSEEVVKKMKNYWRQLLNAKLITQRKFDNLTKAERGGLSEGYTSDEEVLEVFRNTLNKNSEIFSSIKKLEKLFKNFDEYSSAGIFVKNGPAISTISKDIFGEWNVIRDKWNAEYDDIHLKKKAVVTEKYEDDRRKSFKKIGSFSLEQLQEYADADLSVVEKLKEIIIQKVDEIYKVYGSSEKLFDADFVLEKSLKKNDAVVAIMKDLLDSVKSFENYIKAFFGEGKETNRDESFYGDFVLAYDILLKVDHIYDAIRNYVTQKPYSKDKFKLYFQNPQFMGGWDKDKETDYRATILRYGSKYYLAIMDKKYAKCLQKIDKDDVNGNYEKINYKLLPGPNKMLPKVFFSKKWMAYYNPSEDIQKIYKNGTFKKGDMFNLNDCHKLIDFFKDSISRYPKWSNAYDFNFSETEKYKDIAGFYREVEEQGYKVSFESASKKEVDKLVEEGKLYMFQIYNKDFSDKSHGTPNLHTMYFKLLFDENNHGQIRLSGGAELFMRRASLKKEELVVHPANSPIANKNPDNPKKTTTLSYDVYKDKRFSEDQYELHIPIAINKCPKNIFKINTEVRVLLKHDDNPYVIGIARGERNLLYIVVVDGKGNIVEQYSLNEIINNFNGIRIKTDYHSLLDKKEKERFEARQNWTSIENIKELKAGYISQVVHKICELVEKYDAVIALEDLNSGFKNSRVKVEKQVYQKFEKMLIDKLNYMVDKKSNPCATGGALKGYQITNKFESFKSMSTQNGFIFYIPAWLTSKIDPSTGFVNLLKTKYTSIADSKKFISSFDRIMYVPEEDLFEFALDYKNFSRTDADYIKKWKLYSYGNRIRIFRNPKKNNVFDWEEVCLTSAYKELFNKYGINYQQGDIRALLCEQSDKAFYSSFMALMSLMLQMRNSITGRTDVDFLISPVKNSDGIFYDSRNYEAQENAILPKNADANGAYNIARKVLWAIGQFKKAEDEKLDKVKIAISNKEWLEYAQTSVKH

SEQ ID NO: 488 - protein, 1377 aa, Synthetic construct
MGSKLEKFTNCYSLSKTLRFKAIPVGKTQENIDNKRLLVEDEKRAEDYKGVKKLLDRYYLSFINDVLHSIKLKNLNNYISLFRKKTRTEKENKELENLEINLRKEIAKAFKGNEGYKSLFKKDIIETILPEFLDDKDEIALVNSFNGFTTAFTGFFDNRENMFSEEAKSTSIAFRCINENLTRYISNMDIFEKVDAIFDKHEVQEIKEKILNSDYDVEDFFEGEFFNFVLTQEGIDVYNAIIGGFVTESGEKIKGLNEYINLYNQKTKQKLPKFKPLYKQVLSDRESLSFYGGSSGENQTTQKGQKNSRERMKRIEEGIKELGSQILKEHPVENTQLQNEKLYLYYLQNGRDMYVDQELDINRLSDYDVDHIVPQSFLKDDSIDNKVLTRSDKNRGKSDNVPSEEVVKKMKNYWRQLLNAKLITQRKFDNLTKAERGGLSEGYTSDEEVLEVFRNTLNKNSEIFSSIKKLEKLFKNFDEYSSAGIFVKNGPAISTISKDIFGEWNVIRDKWNAEYDDIHLKKKAVVTEKYEDDRRKSFKKIGSFSLEQLQEYADADLSVVEKLKEIIIQKVDEIYKVYGSSEKLFDADFVLEKSLKKNDAVVAIMKDLLDSVKSFENYIKAFFGEGKETNRDESFYGDFVLAYDILLKVDHIYDAIRNYVTQKPYSKDKFKLYFQNPQFMGGWDKDKETDYRATILRYGSKYYLAIMDKKYAKCLQKIDKDDVNGNYEKINYKLLPGPNKMLPKVFFSKKWMAYYNPSEDIQKIYKNGTFKKGDMFNLNDCHKLIDFFKDSISRYPKWSNAYDFNFSETEKYKDIAGFYREVEEQGYKVSFESASKKEVDKLVEEGKLYMFQIYNKDFSDKSHGTPNLHTMYFKLLFDENNHGQIRLSGGAELFMRRASLKKEELVVHPANSPIANKNPDNPKKTTTLSYDVYKDKRFSEDQYELHIPIAINKCPKNIFKINTEVRVLLKHDDNPYVIGIARGERNLLYIVVVDGKGNIVEQYSLNEIINNFNGIRIKTDYHSLLDKKEKERFEARQNWTSIENIKELKAGYISQVVHKICELVEKYDAVIALEDLNSGFKNSRVKVEKQVYQKFEKMLIDKLNYMVDKKSNPCATGGALKGYQITNKFESFKSMSTQNGFIFYIPAWLTSKIDPSTGFVNLLKTKYTSIADSKKFISSFDRIMYVPEEDLFEFALDYKNFSRTDADYIKKWKLYSYGNRIRIFRNPKKNNVFDWEEVCLTSAYKELFNKYGINYQQGDIRALLCEQSDKAFYSSFMALMSLMLQMRNSITGRTDVDFLISPVKNSDGIFYDSRNYEAQENAILPKNADANGAYNIARKVLWAIGQFKKAEDEKLDKVKIAISNKEWLEYAQTSVKH

SEQ ID NO: 489 - protein, 1379 aa, Synthetic construct
MGSKLEKFTNCYSLSKTLRFKAIPVGKTQENIDNKRLLVEDEKRAEDYKGVKKLLDRYYLSFINDVLHSIKLKNLNNYISLFRKKTRTEKENKELENLEINLRKEIAKAFKGNEGYKSLFKKDIIETILPEFLDDKDEIALVNSFNGFTTAFTGFFDNRENMFSEEAKSTSIAFRCINENLTRYISNMDIFEKVDAIFDKHEVQEIKEKILNSDYDVEDFFEGEFFNFVLTQEGIDVYNAIIGGFVTESGEKIKGLNEYINLYNQKTKQKLPKFKPLYKQVLSDRESLSFYGGSSGENQTTQKGQKNSRERMKRIEEGIKELGSQILKEHPVENTQLQNEKLYLYYLQNGRDMYVDQELDINRLSDYDVDHIVPQSFLKDDSIDNKVLTRSDKNRGKSDNVPSEEVVKKMKNYWRQLLNAKLITQRKFDNLTKAERGGLSGSEGYTSDEEVLEVFRNTLNKNSEIFSSIKKLEKLFKNFDEYSSAGIFVKNGPAISTISKDIFGEWNVIRDKWNAEYDDIHLKKKAVVTEKYEDDRRKSFKKIGSFSLEQLQEYADADLSVVEKLKEIIIQKVDEIYKVYGSSEKLFDADFVLEKSLKKNDAVVAIMKDLLDSVKSFENYIKAFFGEGKETNRDESFYGDFVLAYDILLKVDHIYDAIRNYVTQKPYSKDKFKLYFQNPQFMGGWDKDKETDYRATILRYGSKYYLAIMDKKYAKCLQKIDKDDVNGNYEKINYKLLPGPNKMLPKVFFSKKWMAYYNPSEDIQKIYKNGTFKKGDMFNLNDCHKLIDFFKDSISRYPKWSNAYDFNFSETEKYKDIAGFYREVEEQGYKVSFESASKKEVDKLVEEGKLYMFQIYNKDFSDKSHGTPNLHTMYFKLLFDENNHGQIRLSGGAELFMRRASLKKEELVVHPANSPIANKNPDNPKKTTTLSYDVYKDKRFSEDQYELHIPIAINKCPKNIFKINTEVRVLLKHDDNPYVIGIARGERNLLYIVVVDGKGNIVEQYSLNEIINNFNGIRIKTDYHSLLDKKEKERFEARQNWTSIENIKELKAGYISQVVHKICELVEKYDAVIALEDLNSGFKNSRVKVEKQVYQKFEKMLIDKLNYMVDKKSNPCATGGALKGYQITNKFESFKSMSTQNGFIFYIPAWLTSKIDPSTGFVNLLKTKYTSIADSKKFISSFDRIMYVPEEDLFEFALDYKNFSRTDADYIKKWKLYSYGNRIRIFRNPKKNNVFDWEEVCLTSAYKELFNKYGINYQQGDIRALLCEQSDKAFYSSFMALMSLMLQMRNSITGRTDVDFLISPVKNSDGIFYDSRNYEAQENAILPKNADANGAYNIARKVLWAIGQFKKAEDEKLDKVKIAISNKEWLEYAQTSVKH

SEQ ID NO: 490 - protein, 1373 aa, Synthetic construct
MGSKLEKFTNCYSLSKTLRFKAIPVGKTQENIDNKRLLVEDEKRAEDYKGVKKLLDRYYLSFINDVLHSIKLKNLNNYISLFRKKTRTEKENKELENLEINLRKEIAKAFKGNEGYKSLFKKDIIETILPEFLDDKDEIALVNSFNGFTTAFTGFFDNRENMFSEEAKSTSIAFRCINENLTRYISNMDIFEKVDAIFDKHEVQEIKEKILNSDYDVEDFFEGEFFNFVLTQEGIDVYNAIIGGFVTESGEKIKGLNEYINLYNQKTKQKLPKFKPLYKQVLSDRESLSFYGEENQTTQKGQKNSRERMKRIEEGIKELGSQILKEHPVENTQLQNEKLYLYYLQNGRDMYVDQELDINRLSDYDVDHIVPQSFLKDDSIDNKVLTRSDKNRGKSDNVPSEEVVKKMKNYWRQLLNAKLITQRKFDNLTKAERGGLSGYTSDEEVLEVFRNTLNKNSEIFSSIKKLEKLFKNFDEYSSAGIFVKNGPAISTISKDIFGEWNVIRDKWNAEYDDIHLKKKAVVTEKYEDDRRKSFKKIGSFSLEQLQEYADADLSVVEKLKEIIIQKVDEIYKVYGSSEKLFDADFVLEKSLKKNDAVVAIMKDLLDSVKSFENYIKAFFGEGKETNRDESFYGDFVLAYDILLKVDHIYDAIRNYVTQKPYSKDKFKLYFQNPQFMGGWDKDKETDYRATILRYGSKYYLAIMDKKYAKCLQKIDKDDVNGNYEKINYKLLPGPNKMLPKVFFSKKWMAYYNPSEDIQKIYKNGTFKKGDMFNLNDCHKLIDFFKDSISRYPKWSNAYDFNFSETEKYKDIAGFYREVEEQGYKVSFESASKKEVDKLVEEGKLYMFQIYNKDFSDKSHGTPNLHTMYFKLLFDENNHGQIRLSGGAELFMRRASLKKEELVVHPANSPIANKNPDNPKKTTTLSYDVYKDKRFSEDQYELHIPIAINKCPKNIFKINTEVRVLLKHDDNPYVIGIARGERNLLYIVVVDGKGNIVEQYSLNEIINNFNGIRIKTDYHSLLDKKEKERFEARQNWTSIENIKELKAGYISQVVHKICELVEKYDAVIALEDLNSGFKNSRVKVEKQVYQKFEKMLIDKLNYMVDKKSNPCATGGALKGYQITNKFESFKSMSTQNGFIFYIPAWLTSKIDPSTGFVNLLKTKYTSIADSKKFISSFDRIMYVPEEDLFEFALDYKNFSRTDADYIKKWKLYSYGNRIRIFRNPKKNNVFDWEEVCLTSAYKELFNKYGINYQQGDIRALLCEQSDKAFYSSFMALMSLMLQMRNSITGRTDVDFLISPVKNSDGIFYDSRNYEAQENAILPKNADANGAYNIARKVLWAIGQFKKAEDEKLDKVKIAISNKEWLEYAQTSVKH

SEQ ID NO: 491 - protein, 1375 aa, Synthetic construct
MGSKLEKFTNCYSLSKTLRFKAIPVGKTQENIDNKRLLVEDEKRAEDYKGVKKLLDRYYLSFINDVLHSIKLKNLNNYISLFRKKTRTEKENKELENLEINLRKEIAKAFKGNEGYKSLFKKDIIETILPEFLDDKDEIALVNSFNGFTTAFTGFFDNRENMFSEEAKSTSIAFRCINENLTRYISNMDIFEKVDAIFDKHEVQEIKEKILNSDYDVEDFFEGEFFNFVLTQEGIDVYNAIIGGFVTESGEKIKGLNEYINLYNQKTKQKLPKFKPLYKQVLSDRESLSFYGEGSENQTTQKGQKNSRERMKRIEEGIKELGSQILKEHPVENTQLQNEKLYLYYLQNGRDMYVDQELDINRLSDYDVDHIVPQSFLKDDSIDNKVLTRSDKNRGKSDNVPSEEVVKKMKNYWRQLLNAKLITQRKFDNLTKAERGGLSGYTSDEEVLEVFRNTLNKNSEIFSSIKKLEKLFKNFDEYSSAGIFVKNGPAISTISKDIFGEWNVIRDKWNAEYDDIHLKKKAVVTEKYEDDRRKSFKKIGSFSLEQLQEYADADLSVVEKLKEIIIQKVDEIYKVYGSSEKLFDADFVLEKSLKKNDAVVAIMKDLLDSVKSFENYIKAFFGEGKETNRDESFYGDFVLAYDILLKVDHIYDAIRNYVTQKPYSKDKFKLYFQNPQFMGGWDKDKETDYRATILRYGSKYYLAIMDKKYAKCLQKIDKDDVNGNYEKINYKLLPGPNKMLPKVFFSKKWMAYYNPSEDIQKIYKNGTFKKGDMFNLNDCHKLIDFFKDSISRYPKWSNAYDFNFSETEKYKDIAGFYREVEEQGYKVSFESASKKEVDKLVEEGKLYMFQIYNKDFSDKSHGTPNLHTMYFKLLFDENNHGQIRLSGGAELFMRRASLKKEELVVHPANSPIANKNPDNPKKTTTLSYDVYKDKRFSEDQYELHIPIAINKCPKNIFKINTEVRVLLKHDDNPYVIGIARGERNLLYIVVVDGKGNIVEQYSLNEIINNFNGIRIKTDYHSLLDKKEKERFEARQNWTSIENIKELKAGYISQVVHKICELVEKYDAVIALEDLNSGFKNSRVKVEKQVYQKFEKMLIDKLNYMVDKKSNPCATGGALKGYQITNKFESFKSMSTQNGFIFYIPAWLTSKIDPSTGFVNLLKTKYTSIADSKKFISSFDRIMYVPEEDLFEFALDYKNFSRTDADYIKKWKLYSYGNRIRIFRNPKKNNVFDWEEVCLTSAYKELFNKYGINYQQGDIRALLCEQSDKAFYSSFMALMSLMLQMRNSITGRTDVDFLISPVKNSDGIFYDSRNYEAQENAILPKNADANGAYNIARKVLWAIGQFKKAEDEKLDKVKIAISNKEWLEYAQTSVKH

SEQ ID NO: 492 - protein, 1377 aa, Synthetic construct
MGSKLEKFTNCYSLSKTLRFKAIPVGKTQENIDNKRLLVEDEKRAEDYKGVKKLLDRYYLSFINDVLHSIKLKNLNNYISLFRKKTRTEKENKELENLEINLRKEIAKAFKGNEGYKSLFKKDIIETILPEFLDDKDEIALVNSFNGFTTAFTGFFDNRENMFSEEAKSTSIAFRCINENLTRYISNMDIFEKVDAIFDKHEVQEIKEKILNSDYDVEDFFEGEFFNFVLTQEGIDVYNAIIGGFVTESGEKIKGLNEYINLYNQKTKQKLPKFKPLYKQVLSDRESLSFYGEGSSGENQTTQKGQKNSRERMKRIEEGIKELGSQILKEHPVENTQLQNEKLYLYYLQNGRDMYVDQELDINRLSDYDVDHIVPQSFLKDDSIDNKVLTRSDKNRGKSDNVPSEEVVKKMKNYWRQLLNAKLITQRKFDNLTKAERGGLSGYTSDEEVLEVFRNTLNKNSEIFSSIKKLEKLFKNFDEYSSAGIFVKNGPAISTISKDIFGEWNVIRDKWNAEYDDIHLKKKAVVTEKYEDDRRKSFKKIGSFSLEQLQEYADADLSVVEKLKEIIIQKVDEIYKVYGSSEKLFDADFVLEKSLKKNDAVVAIMKDLLDSVKSFENYIKAFFGEGKETNRDESFYGDFVLAYDILLKVDHIYDAIRNYVTQKPYSKDKFKLYFQNPQFMGGWDKDKETDYRATILRYGSKYYLAIMDKKYAKCLQKIDKDDVNGNYEKINYKLLPGPNKMLPKVFFSKKWMAYYNPSEDIQKIYKNGTFKKGDMFNLNDCHKLIDFFKDSISRYPKWSNAYDFNFSETEKYKDIAGFYREVEEQGYKVSFESASKKEVDKLVEEGKLYMFQIYNKDFSDKSHGTPNLHTMYFKLLFDENNHGQIRLSGGAELFMRRASLKKEELVVHPANSPIANKNPDNPKKTTTLSYDVYKDKRFSEDQYELHIPIAINKCPKNIFKINTEVRVLLKHDDNPYVIGIARGERNLLYIVVVDGKGNIVEQYSLNEIINNFNGIRIKTDYHSLLDKKEKERFEARQNWTSIENIKELKAGYISQVVHKICELVEKYDAVIALEDLNSGFKNSRVKVEKQVYQKFEKMLIDKLNYMVDKKSNPCATGGALKGYQITNKFESFKSMSTQNGFIFYIPAWLTSKIDPSTGFVNLLKTKYTSIADSKKFISSFDRIMYVPEEDLFEFALDYKNFSRTDADYIKKWKLYSYGNRIRIFRNPKKNNVFDWEEVCLTSAYKELFNKYGINYQQGDIRALLCEQSDKAFYSSFMALMSLMLQMRNSITGRTDVDFLISPVKNSDGIFYDSRNYEAQENAILPKNADANGAYNIARKVLWAIGQFKKAEDEKLDKVKIAISNKEWLEYAQTSVKH

SEQ ID NO: 493 - protein, 1379 aa, Synthetic construct
MGSKLEKFTNCYSLSKTLRFKAIPVGKTQENIDNKRLLVEDEKRAEDYKGVKKLLDRYYLSFINDVLHSIKLKNLNNYISLFRKKTRTEKENKELENLEINLRKEIAKAFKGNEGYKSLFKKDIIETILPEFLDDKDEIALVNSFNGFTTAFTGFFDNRENMFSEEAKSTSIAFRCINENLTRYISNMDIFEKVDAIFDKHEVQEIKEKILNSDYDVEDFFEGEFFNFVLTQEGIDVYNAIIGGFVTESGEKIKGLNEYINLYNQKTKQKLPKFKPLYKQVLSDRESLSFYGEGSSGENQTTQKGQKNSRERMKRIEEGIKELGSQILKEHPVENTQLQNEKLYLYYLQNGRDMYVDQELDINRLSDYDVDHIVPQSFLKDDSIDNKVLTRSDKNRGKSDNVPSEEVVKKMKNYWRQLLNAKLITQRKFDNLTKAERGGLSGSGYTSDEEVLEVFRNTLNKNSEIFSSIKKLEKLFKNFDEYSSAGIFVKNGPAISTISKDIFGEWNVIRDKWNAEYDDIHLKKKAVVTEKYEDDRRKSFKKIGSFSLEQLQEYADADLSVVEKLKEIIIQKVDEIYKVYGSSEKLFDADFVLEKSLKKNDAVVAIMKDLLDSVKSFENYIKAFFGEGKETNRDESFYGDFVLAYDILLKVDHIYDAIRNYVTQKPYSKDKFKLYFQNPQFMGGWDKDKETDYRATILRYGSKYYLAIMDKKYAKCLQKIDKDDVNGNYEKINYKLLPGPNKMLPKVFFSKKWMAYYNPSEDIQKIYKNGTFKKGDMFNLNDCHKLIDFFKDSISRYPKWSNAYDFNFSETEKYKDIAGFYREVEEQGYKVSFESASKKEVDKLVEEGKLYMFQIYNKDFSDKSHGTPNLHTMYFKLLFDENNHGQIRLSGGAELFMRRASLKKEELVVHPANSPIANKNPDNPKKTTTLSYDVYKDKRFSEDQYELHIPIAINKCPKNIFKINTEVRVLLKHDDNPYVIGIARGERNLLYIVVVDGKGNIVEQYSLNEIINNFNGIRIKTDYHSLLDKKEKERFEARQNWTSIENIKELKAGYISQVVHKICELVEKYDAVIALEDLNSGFKNSRVKVEKQVYQKFEKMLIDKLNYMVDKKSNPCATGGALKGYQITNKFESFKSMSTQNGFIFYIPAWLTSKIDPSTGFVNLLKTKYTSIADSKKFISSFDRIMYVPEEDLFEFALDYKNFSRTDADYIKKWKLYSYGNRIRIFRNPKKNNVFDWEEVCLTSAYKELFNKYGINYQQGDIRALLCEQSDKAFYSSFMALMSLMLQMRNSITGRTDVDFLISPVKNSDGIFYDSRNYEAQENAILPKNADANGAYNIARKVLWAIGQFKKAEDEKLDKVKIAISNKEWLEYAQTSVKH

SEQ ID NO: 494 - protein, 1373 aa, Synthetic construct
MGSKLEKFTNCYSLSKTLRFKAIPVGKTQENIDNKRLLVEDEKRAEDYKGVKKLLDRYYLSFINDVLHSIKLKNLNNYISLFRKKTRTEKENKELENLEINLRKEIAKAFKGNEGYKSLFKKDIIETILPEFLDDKDEIALVNSFNGFTTAFTGFFDNRENMFSEEAKSTSIAFRCINENLTRYISNMDIFEKVDAIFDKHEVQEIKEKILNSDYDVEDFFEGEFFNFVLTQEGIDVYNAIIGGFVTESGEKIKGLNEYINLYNQKTKQKLPKFKPLYKQVLSDRESLSFYGENQTTQKGQKNSRERMKRIEEGIKELGSQILKEHPVENTQLQNEKLYLYYLQNGRDMYVDQELDINRLSDYDVDHIVPQSFLKDDSIDNKVLTRSDKNRGKSDNVPSEEVVKKMKNYWRQLLNAKLITQRKFDNLTKAERGGLSEGYTSDEEVLEVFRNTLNKNSEIFSSIKKLEKLFKNFDEYSSAGIFVKNGPAISTISKDIFGEWNVIRDKWNAEYDDIHLKKKAVVTEKYEDDRRKSFKKIGSFSLEQLQEYADADLSVVEKLKEIIIQKVDEIYKVYGSSEKLFDADFVLEKSLKKNDAVVAIMKDLLDSVKSFENYIKAFFGEGKETNRDESFYGDFVLAYDILLKVDHIYDAIRNYVTQKPYSKDKFKLYFQNPQFMGGWDKDKETDYRATILRYGSKYYLAIMDKKYAKCLQKIDKDDVNGNYEKINYKLLPGPNKMLPKVFFSKKWMAYYNPSEDIQKIYKNGTFKKGDMFNLNDCHKLIDFFKDSISRYPKWSNAYDFNFSETEKYKDIAGFYREVEEQGYKVSFESASKKEVDKLVEEGKLYMFQIYNKDFSDKSHGTPNLHTMYFKLLFDENNHGQIRLSGGAELFMRRASLKKEELVVHPANSPIANKNPDNPKKTTTLSYDVYKDKRFSEDQYELHIPIAINKCPKNIFKINTEVRVLLKHDDNPYVIGIDRGERNLLYIVVVDGKGNIVEQYSLNEIINNFNGIRIKTDYHSLLDKKEKERFEARQNWTSIENIKELKAGYISQVVHKICELVEKYDAVIALEDLNSGFKNSRVKVEKQVYQKFEKMLIDKLNYMVDKKSNPCATGGALKGYQITNKFESFKSMSTQNGFIFYIPAWLTSKIDPSTGFVNLLKTKYTSIADSKKFISSFDRIMYVPEEDLFEFALDYKNFSRTDADYIKKWKLYSYGNRIRIFRNPKKNNVFDWEEVCLTSAYKELFNKYGINYQQGDIRALLCEQSDKAFYSSFMALMSLMLQMRNSITGRTDVDFLISPVKNSDGIFYDSRNYEAQENAILPKNADANGAYNIARKVLWAIGQFKKAEDEKLDKVKIAISNKEWLEYAQTSVKH

SEQ ID NO: 495 - protein, 1375 aa, Synthetic construct
MGSKLEKFTNCYSLSKTLRFKAIPVGKTQENIDNKRLLVEDEKRAEDYKGVKKLLDRYYLSFINDVLHSIKLKNLNNYISLFRKKTRTEKENKELENLEINLRKEIAKAFKGNEGYKSLFKKDIIETILPEFLDDKDEIALVNSFNGFTTAFTGFFDNRENMFSEEAKSTSIAFRCINENLTRYISNMDIFEKVDAIFDKHEVQEIKEKILNSDYDVEDFFEGEFFNFVLTQEGIDVYNAIIGGFVTESGEKIKGLNEYINLYNQKTKQKLPKFKPLYKQVLSDRESLSFYGSGENQTTQKGQKNSRERMKRIEEGIKELGSQILKEHPVENTQLQNEKLYLYYLQNGRDMYVDQELDINRLSDYDVDHIVPQSFLKDDSIDNKVLTRSDKNRGKSDNVPSEEVVKKMKNYWRQLLNAKLITQRKFDNLTKAERGGLSEGYTSDEEVLEVFRNTLNKNSEIFSSIKKLEKLFKNFDEYSSAGIFVKNGPAISTISKDIFGEWNVIRDKWNAEYDDIHLKKKAVVTEKYEDDRRKSFKKIGSFSLEQLQEYADADLSVVEKLKEIIIQKVDEIYKVYGSSEKLFDADFVLEKSLKKNDAVVAIMKDLLDSVKSFENYIKAFFGEGKETNRDESFYGDFVLAYDILLKVDHIYDAIRNYVTQKPYSKDKFKLYFQNPQFMGGWDKDKETDYRATILRYGSKYYLAIMDKKYAKCLQKIDKDDVNGNYEKINYKLLPGPNKMLPKVFFSKKWMAYYNPSEDIQKIYKNGTFKKGDMFNLNDCHKLIDFFKDSISRYPKWSNAYDFNFSETEKYKDIAGFYREVEEQGYKVSFESASKKEVDKLVEEGKLYMFQIYNKDFSDKSHGTPNLHTMYFKLLFDENNHGQIRLSGGAELFMRRASLKKEELVVHPANSPIANKNPDNPKKTTTLSYDVYKDKRFSEDQYELHIPIAINKCPKNIFKINTEVRVLLKHDDNPYVIGIDRGERNLLYIVVVDGKGNIVEQYSLNEIINNFNGIRIKTDYHSLLDKKEKERFEARQNWTSIENIKELKAGYISQVVHKICELVEKYDAVIALEDLNSGFKNSRVKVEKQVYQKFEKMLIDKLNYMVDKKSNPCATGGALKGYQITNKFESFKSMSTQNGFIFYIPAWLTSKIDPSTGFVNLLKTKYTSIADSKKFISSFDRIMYVPEEDLFEFALDYKNFSRTDADYIKKWKLYSYGNRIRIFRNPKKNNVFDWEEVCLTSAYKELFNKYGINYQQGDIRALLCEQSDKAFYSSFMALMSLMLQMRNSITGRTDVDFLISPVKNSDGIFYDSRNYEAQENAILPKNADANGAYNIARKVLWAIGQFKKAEDEKLDKVKIAISNKEWLEYAQTSVKH

SEQ ID NO: 496 - protein, 1377 aa, Synthetic construct
MGSKLEKFTNCYSLSKTLRFKAIPVGKTQENIDNKRLLVEDEKRAEDYKGVKKLLDRYYLSFINDVLHSIKLKNLNNYISLFRKKTRTEKENKELENLEINLRKEIAKAFKGNEGYKSLFKKDIIETILPEFLDDKDEIALVNSFNGFTTAFTGFFDNRENMFSEEAKSTSIAFRCINENLTRYISNMDIFEKVDAIFDKHEVQEIKEKILNSDYDVEDFFEGEFFNFVLTQEGIDVYNAIIGGFVTESGEKIKGLNEYINLYNQKTKQKLPKFKPLYKQVLSDRESLSFYGGSSGENQTTQKGQKNSRERMKRIEEGIKELGSQILKEHPVENTQLQNEKLYLYYLQNGRDMYVDQELDINRLSDYDVDHIVPQSFLKDDSIDNKVLTRSDKNRGKSDNVPSEEVVKKMKNYWRQLLNAKLITQRKFDNLTKAERGGLSEGYTSDEEVLEVFRNTLNKNSEIFSSIKKLEKLFKNFDEYSSAGIFVKNGPAISTISKDIFGEWNVIRDKWNAEYDDIHLKKKAVVTEKYEDDRRKSFKKIGSFSLEQLQEYADADLSVVEKLKEIIIQKVDEIYKVYGSSEKLFDADFVLEKSLKKNDAVVAIMKDLLDSVKSFENYIKAFFGEGKETNRDESFYGDFVLAYDILLKVDHIYDAIRNYVTQKPYSKDKFKLYFQNPQFMGGWDKDKETDYRATILRYGSKYYLAIMDKKYAKCLQKIDKDDVNGNYEKINYKLLPGPNKMLPKVFFSKKWMAYYNPSEDIQKIYKNGTFKKGDMFNLNDCHKLIDFFKDSISRYPKWSNAYDFNFSETEKYKDIAGFYREVEEQGYKVSFESASKKEVDKLVEEGKLYMFQIYNKDFSDKSHGTPNLHTMYFKLLFDENNHGQIRLSGGAELFMRRASLKKEELVVHPANSPIANKNPDNPKKTTTLSYDVYKDKRFSEDQYELHIPIAINKCPKNIFKINTEVRVLLKHDDNPYVIGIDRGERNLLYIVVVDGKGNIVEQYSLNEIINNFNGIRIKTDYHSLLDKKEKERFEARQNWTSIENIKELKAGYISQVVHKICELVEKYDAVIALEDLNSGFKNSRVKVEKQVYQKFEKMLIDKLNYMVDKKSNPCATGGALKGYQITNKFESFKSMSTQNGFIFYIPAWLTSKIDPSTGFVNLLKTKYTSIADSKKFISSFDRIMYVPEEDLFEFALDYKNFSRTDADYIKKWKLYSYGNRIRIFRNPKKNNVFDWEEVCLTSAYKELFNKYGINYQQGDIRALLCEQSDKAFYSSFMALMSLMLQMRNSITGRTDVDFLISPVKNSDGIFYDSRNYEAQENAILPKNADANGAYNIARKVLWAIGQFKKAEDEKLDKVKIAISNKEWLEYAQTSVKH

SEQ ID NO: 497 - protein, 1379 aa, Synthetic construct
MGSKLEKFTNCYSLSKTLRFKAIPVGKTQENIDNKRLLVEDEKRAEDYKGVKKLLDRYYLSFINDVLHSIKLKNLNNYISLFRKKTRTEKENKELENLEINLRKEIAKAFKGNEGYKSLFKKDIIETILPEFLDDKDEIALVNSFNGFTTAFTGFFDNRENMFSEEAKSTSIAFRCINENLTRYISNMDIFEKVDAIFDKHEVQEIKEKILNSDYDVEDFFEGEFFNFVLTQEGIDVYNAIIGGFVTESGEKIKGLNEYINLYNQKTKQKLPKFKPLYKQVLSDRESLSFYGGSSGENQTTQKGQKNSRERMKRIEEGIKELGSQILKEHPVENTQLQNEKLYLYYLQNGRDMYVDQELDINRLSDYDVDHIVPQSFLKDDSIDNKVLTRSDKNRGKSDNVPSEEVVKKMKNYWRQLLNAKLITQRKFDNLTKAERGGLSGSEGYTSDEEVLEVFRNTLNKNSEIFSSIKKLEKLFKNFDEYSSAGIFVKNGPAISTISKDIFGEWNVIRDKWNAEYDDIHLKKKAVVTEKYEDDRRKSFKKIGSFSLEQLQEYADADLSVVEKLKEIIIQKVDEIYKVYGSSEKLFDADFVLEKSLKKNDAVVAIMKDLLDSVKSFENYIKAFFGEGKETNRDESFYGDFVLAYDILLKVDHIYDAIRNYVTQKPYSKDKFKLYFQNPQFMGGWDKDKETDYRATILRYGSKYYLAIMDKKYAKCLQKIDKDDVNGNYEKINYKLLPGPNKMLPKVFFSKKWMAYYNPSEDIQKIYKNGTFKKGDMFNLNDCHKLIDFFKDSISRYPKWSNAYDFNFSETEKYKDIAGFYREVEEQGYKVSFESASKKEVDKLVEEGKLYMFQIYNKDFSDKSHGTPNLHTMYFKLLFDENNHGQIRLSGGAELFMRRASLKKEELVVHPANSPIANKNPDNPKKTTTLSYDVYKDKRFSEDQYELHIPIAINKCPKNIFKINTEVRVLLKHDDNPYVIGIDRGERNLLYIVVVDGKGNIVEQYSLNEIINNFNGIRIKTDYHSLLDKKEKERFEARQNWTSIENIKELKAGYISQVVHKICELVEKYDAVIALEDLNSGFKNSRVKVEKQVYQKFEKMLIDKLNYMVDKKSNPCATGGALKGYQITNKFESFKSMSTQNGFIFYIPAWLTSKIDPSTGFVNLLKTKYTSIADSKKFISSFDRIMYVPEEDLFEFALDYKNFSRTDADYIKKWKLYSYGNRIRIFRNPKKNNVFDWEEVCLTSAYKELFNKYGINYQQGDIRALLCEQSDKAFYSSFMALMSLMLQMRNSITGRTDVDFLISPVKNSDGIFYDSRNYEAQENAILPKNADANGAYNIARKVLWAIGQFKKAEDEKLDKVKIAISNKEWLEYAQTSVKH

SEQ ID NO: 498 - protein, 1373 aa, Synthetic construct
MGSKLEKFTNCYSLSKTLRFKAIPVGKTQENIDNKRLLVEDEKRAEDYKGVKKLLDRYYLSFINDVLHSIKLKNLNNYISLFRKKTRTEKENKELENLEINLRKEIAKAFKGNEGYKSLFKKDIIETILPEFLDDKDEIALVNSFNGFTTAFTGFFDNRENMFSEEAKSTSIAFRCINENLTRYISNMDIFEKVDAIFDKHEVQEIKEKILNSDYDVEDFFEGEFFNFVLTQEGIDVYNAIIGGFVTESGEKIKGLNEYINLYNQKTKQKLPKFKPLYKQVLSDRESLSFYGEENQTTQKGQKNSRERMKRIEEGIKELGSQILKEHPVENTQLQNEKLYLYYLQNGRDMYVDQELDINRLSDYDVDHIVPQSFLKDDSIDNKVLTRSDKNRGKSDNVPSEEVVKKMKNYWRQLLNAKLITQRKFDNLTKAERGGLSGYTSDEEVLEVFRNTLNKNSEIFSSIKKLEKLFKNFDEYSSAGIFVKNGPAISTISKDIFGEWNVIRDKWNAEYDDIHLKKKAVVTEKYEDDRRKSFKKIGSFSLEQLQEYADADLSVVEKLKEIIIQKVDEIYKVYGSSEKLFDADFVLEKSLKKNDAVVAIMKDLLDSVKSFENYIKAFFGEGKETNRDESFYGDFVLAYDILLKVDHIYDAIRNYVTQKPYSKDKFKLYFQNPQFMGGWDKDKETDYRATILRYGSKYYLAIMDKKYAKCLQKIDKDDVNGNYEKINYKLLPGPNKMLPKVFFSKKWMAYYNPSEDIQKIYKNGTFKKGDMFNLNDCHKLIDFFKDSISRYPKWSNAYDFNFSETEKYKDIAGFYREVEEQGYKVSFESASKKEVDKLVEEGKLYMFQIYNKDFSDKSHGTPNLHTMYFKLLFDENNHGQIRLSGGAELFMRRASLKKEELVVHPANSPIANKNPDNPKKTTTLSYDVYKDKRFSEDQYELHIPIAINKCPKNIFKINTEVRVLLKHDDNPYVIGIDRGERNLLYIVVVDGKGNIVEQYSLNEIINNFNGIRIKTDYHSLLDKKEKERFEARQNWTSIENIKELKAGYISQVVHKICELVEKYDAVIALEDLNSGFKNSRVKVEKQVYQKFEKMLIDKLNYMVDKKSNPCATGGALKGYQITNKFESFKSMSTQNGFIFYIPAWLTSKIDPSTGFVNLLKTKYTSIADSKKFISSFDRIMYVPEEDLFEFALDYKNFSRTDADYIKKWKLYSYGNRIRIFRNPKKNNVFDWEEVCLTSAYKELFNKYGINYQQGDIRALLCEQSDKAFYSSFMALMSLMLQMRNSITGRTDVDFLISPVKNSDGIFYDSRNYEAQENAILPKNADANGAYNIARKVLWAIGQFKKAEDEKLDKVKIAISNKEWLEYAQTSVKH

SEQ ID NO: 499 - protein, 1375 aa, Synthetic construct
MGSKLEKFTNCYSLSKTLRFKAIPVGKTQENIDNKRLLVEDEKRAEDYKGVKKLLDRYYLSFINDVLHSIKLKNLNNYISLFRKKTRTEKENKELENLEINLRKEIAKAFKGNEGYKSLFKKDIIETILPEFLDDKDEIALVNSFNGFTTAFTGFFDNRENMFSEEAKSTSIAFRCINENLTRYISNMDIFEKVDAIFDKHEVQEIKEKILNSDYDVEDFFEGEFFNFVLTQEGIDVYNAIIGGFVTESGEKIKGLNEYINLYNQKTKQKLPKFKPLYKQVLSDRESLSFYGEGSENQTTQKGQKNSRERMKRIEEGIKELGSQILKEHPVENTQLQNEKLYLYYLQNGRDMYVDQELDINRLSDYDVDHIVPQSFLKDDSIDNKVLTRSDKNRGKSDNVPSEEVVKKMKNYWRQLLNAKLITQRKFDNLTKAERGGLSGYTSDEEVLEVFRNTLNKNSEIFSSIKKLEKLFKNFDEYSSAGIFVKNGPAISTISKDIFGEWNVIRDKWNAEYDDIHLKKKAVVTEKYEDDRRKSFKKIGSFSLEQLQEYADADLSVVEKLKEIIIQKVDEIYKVYGSSEKLFDADFVLEKSLKKNDAVVAIMKDLLDSVKSFENYIKAFFGEGKETNRDESFYGDFVLAYDILLKVDHIYDAIRNYVTQKPYSKDKFKLYFQNPQFMGGWDKDKETDYRATILRYGSKYYLAIMDKKYAKCLQKIDKDDVNGNYEKINYKLLPGPNKMLPKVFFSKKWMAYYNPSEDIQKIYKNGTFKKGDMFNLNDCHKLIDFFKDSISRYPKWSNAYDFNFSETEKYKDIAGFYREVEEQGYKVSFESASKKEVDKLVEEGKLYMFQIYNKDFSDKSHGTPNLHTMYFKLLFDENNHGQIRLSGGAELFMRRASLKKEELVVHPANSPIANKNPDNPKKTTTLSYDVYKDKRFSEDQYELHIPIAINKCPKNIFKINTEVRVLLKHDDNPYVIGIDRGERNLLYIVVVDGKGNIVEQYSLNEIINNFNGIRIKTDYHSLLDKKEKERFEARQNWTSIENIKELKAGYISQVVHKICELVEKYDAVIALEDLNSGFKNSRVKVEKQVYQKFEKMLIDKLNYMVDKKSNPCATGGALKGYQITNKFESFKSMSTQNGFIFYIPAWLTSKIDPSTGFVNLLKTKYTSIADSKKFISSFDRIMYVPEEDLFEFALDYKNFSRTDADYIKKWKLYSYGNRIRIFRNPKKNNVFDWEEVCLTSAYKELFNKYGINYQQGDIRALLCEQSDKAFYSSFMALMSLMLQMRNSITGRTDVDFLISPVKNSDGIFYDSRNYEAQENAILPKNADANGAYNIARKVLWAIGQFKKAEDEKLDKVKIAISNKEWLEYAQTSVKH

SEQ ID NO: 500 - protein, 1377 aa, Synthetic construct
MGSKLEKFTNCYSLSKTLRFKAIPVGKTQENIDNKRLLVEDEKRAEDYKGVKKLLDRYYLSFINDVLHSIKLKNLNNYISLFRKKTRTEKENKELENLEINLRKEIAKAFKGNEGYKSLFKKDIIETILPEFLDDKDEIALVNSFNGFTTAFTGFFDNRENMFSEEAKSTSIAFRCINENLTRYISNMDIFEKVDAIFDKHEVQEIKEKILNSDYDVEDFFEGEFFNFVLTQEGIDVYNAIIGGFVTESGEKIKGLNEYINLYNQKTKQKLPKFKPLYKQVLSDRESLSFYGEGSSGENQTTQKGQKNSRERMKRIEEGIKELGSQILKEHPVENTQLQNEKLYLYYLQNGRDMYVDQELDINRLSDYDVDHIVPQSFLKDDSIDNKVLTRSDKNRGKSDNVPSEEVVKKMKNYWRQLLNAKLITQRKFDNLTKAERGGLSGYTSDEEVLEVFRNTLNKNSEIFSSIKKLEKLFKNFDEYSSAGIFVKNGPAISTISKDIFGEWNVIRDKWNAEYDDIHLKKKAVVTEKYEDDRRKSFKKIGSFSLEQLQEYADADLSVVEKLKEIIIQKVDEIYKVYGSSEKLFDADFVLEKSLKKNDAVVAIMKDLLDSVKSFENYIKAFFGEGKETNRDESFYGDFVLAYDILLKVDHIYDAIRNYVTQKPYSKDKFKLYFQNPQFMGGWDKDKETDYRATILRYGSKYYLAIMDKKYAKCLQKIDKDDVNGNYEKINYKLLPGPNKMLPKVFFSKKWMAYYNPSEDIQKIYKNGTFKKGDMFNLNDCHKLIDFFKDSISRYPKWSNAYDFNFSETEKYKDIAGFYREVEEQGYKVSFESASKKEVDKLVEEGKLYMFQIYNKDFSDKSHGTPNLHTMYFKLLFDENNHGQIRLSGGAELFMRRASLKKEELVVHPANSPIANKNPDNPKKTTTLSYDVYKDKRFSEDQYELHIPIAINKCPKNIFKINTEVRVLLKHDDNPYVIGIDRGERNLLYIVVVDGKGNIVEQYSLNEIINNFNGIRIKTDYHSLLDKKEKERFEARQNWTSIENIKELKAGYISQVVHKICELVEKYDAVIALEDLNSGFKNSRVKVEKQVYQKFEKMLIDKLNYMVDKKSNPCATGGALKGYQITNKFESFKSMSTQNGFIFYIPAWLTSKIDPSTGFVNLLKTKYTSIADSKKFISSFDRIMYVPEEDLFEFALDYKNFSRTDADYIKKWKLYSYGNRIRIFRNPKKNNVFDWEEVCLTSAYKELFNKYGINYQQGDIRALLCEQSDKAFYSSFMALMSLMLQMRNSITGRTDVDFLISPVKNSDGIFYDSRNYEAQENAILPKNADANGAYNIARKVLWAIGQFKKAEDEKLDKVKIAISNKEWLEYAQTSVKH

SEQ ID NO: 501 - protein, 1379 aa, Synthetic construct
MGSKLEKFTNCYSLSKTLRFKAIPVGKTQENIDNKRLLVEDEKRAEDYKGVKKLLDRYYLSFINDVLHSIKLKNLNNYISLFRKKTRTEKENKELENLEINLRKEIAKAFKGNEGYKSLFKKDIIETILPEFLDDKDEIALVNSFNGFTTAFTGFFDNRENMFSEEAKSTSIAFRCINENLTRYISNMDIFEKVDAIFDKHEVQEIKEKILNSDYDVEDFFEGEFFNFVLTQEGIDVYNAIIGGFVTESGEKIKGLNEYINLYNQKTKQKLPKFKPLYKQVLSDRESLSFYGEGSSGENQTTQKGQKNSRERMKRIEEGIKELGSQILKEHPVENTQLQNEKLYLYYLQNGRDMYVDQELDINRLSDYDVDHIVPQSFLKDDSIDNKVLTRSDKNRGKSDNVPSEEVVKKMKNYWRQLLNAKLITQRKFDNLTKAERGGLSGSGYTSDEEVLEVFRNTLNKNSEIFSSIKKLEKLFKNFDEYSSAGIFVKNGPAISTISKDIFGEWNVIRDKWNAEYDDIHLKKKAVVTEKYEDDRRKSFKKIGSFSLEQLQEYADADLSVVEKLKEIIIQKVDEIYKVYGSSEKLFDADFVLEKSLKKNDAVVAIMKDLLDSVKSFENYIKAFFGEGKETNRDESFYGDFVLAYDILLKVDHIYDAIRNYVTQKPYSKDKFKLYFQNPQFMGGWDKDKETDYRATILRYGSKYYLAIMDKKYAKCLQKIDKDDVNGNYEKINYKLLPGPNKMLPKVFFSKKWMAYYNPSEDIQKIYKNGTFKKGDMFNLNDCHKLIDFFKDSISRYPKWSNAYDFNFSETEKYKDIAGFYREVEEQGYKVSFESASKKEVDKLVEEGKLYMFQIYNKDFSDKSHGTPNLHTMYFKLLFDENNHGQIRLSGGAELFMRRASLKKEELVVHPANSPIANKNPDNPKKTTTLSYDVYKDKRFSEDQYELHIPIAINKCPKNIFKINTEVRVLLKHDDNPYVIGIDRGERNLLYIVVVDGKGNIVEQYSLNEIINNFNGIRIKTDYHSLLDKKEKERFEARQNWTSIENIKELKAGYISQVVHKICELVEKYDAVIALEDLNSGFKNSRVKVEKQVYQKFEKMLIDKLNYMVDKKSNPCATGGALKGYQITNKFESFKSMSTQNGFIFYIPAWLTSKIDPSTGFVNLLKTKYTSIADSKKFISSFDRIMYVPEEDLFEFALDYKNFSRTDADYIKKWKLYSYGNRIRIFRNPKKNNVFDWEEVCLTSAYKELFNKYGINYQQGDIRALLCEQSDKAFYSSFMALMSLMLQMRNSITGRTDVDFLISPVKNSDGIFYDSRNYEAQENAILPKNADANGAYNIARKVLWAIGQFKKAEDEKLDKVKIAISNKEWLEYAQTSVKH

SEQ ID NO: 502-510 - skipped (9 entries)

SEQ ID NO: 511 - protein, 36 aa, Homo sapiens
ALDFLSRLPLPPPVSPICTFVSPAAQKAFQPPRSCG

SEQ ID NO: 512 - DNA, 133 bp, Synthetic construct
  source 1..133: mol_type = other DNA
gtaagtatcaaggttacaagacaggtttaaggagaccaatagaaactgggcttgtcgagacagagaagactcttgcgtttctgataggcacctattggtcttactgacatccactttgcctttctctccacag

SEQ ID NO: 513 - protein, 2050 aa, Synthetic construct
MKRTADGSEFESPKKKRKVTLNIEDEHRLHETSKEPDVSLGSTWLSDFPQAWAETGGMGLAVRQAPLIIPLKATSTPVSIKQYPMSQEARLGIKPHIQRLLDQGILVPCQSPWNTPLLPVKKPGTNDYRPVQDLREVNKRVEDIHPTVPNPYNLLSGLPPSHQWYTVLDLKDAFFCLRLHPTSQPLFAFEWRDPEMGISGQLTWTRLPQGFKNSPTLFNEALHRDLADFRIQHPDLILLQYVDDLLLAATSELDCQQGTRALLQTLGNLGYRASAKKAQICQKQVKYLGYLLKEGQRWLTEARKETVMGQPTPKTPRQLREFLGKAGFCRLFIPGFAEMAAPLYPLTKPGTLFNWGPDQQKAYQEIKQALLTAPALGLPDLTKPFELFVDEKQGYAKGVLTQKLGPWRRPVAYLSKKLDPVAAGWPPCLRMVAAIAVLTKDAGKLTMGQPLVILAPHAVEALVKQPPDRWLSNARMTHYQALLLDTDRVQFGPVVALNPATLLPLPEEGLQHNCLDILAEAHGTRPDLTDQPLPDADHTWYTDGSSLLQEGQRKAGAAVTTETEVIWAKALPAGTSAQRAELIALTQALKMAEGKKLNVYTDSRYAFATAHIHGEIYRRRGWLTSEGKEIKNKDEILALLKALFLPKRLSIIHCPGHQKGHSAEARGNRMADQAARKAAITETPDTSTLLIENSSPNSRLINSGGSSGGSSGSETPGTSESATPESSGGSSGGSSKLEKFTNCYSLSKTLRFKAIPVGKTQENIDNKRLLVEDEKRAEDYKGVKKLLDRYYLSFINDVLHSIKLKNLNNYISLFRKKTRTEKENKELENLEINLRKEIAKAFKGNEGYKSLFKKDIIETILPEFLDDKDEIALVNSFNGFTTAFTGFFDNRENMFSEEAKSTSIAFRCINENLTRYISNMDIFEKVDAIFDKHEVQEIKEKILNSDYDVEDFFEGEFFNFVLTQEGIDVYNAIIGGFVTESGEKIKGLNEYINLYNQKTKQKLPKFKPLYKQVLSDRESLSFYGEGYTSDEEVLEVFRNTLNKNSEIFSSIKKLEKLFKNFDEYSSAGIFVKNGPAISTISKDIFGEWNVIRDKWNAEYDDIHLKKKAVVTEKYEDDRRKSFKKIGSFSLEQLQEYADADLSVVEKLKEIIIQKVDEIYKVYGSSEKLFDADFVLEKSLKKNDAVVAIMKDLLDSVKSFENYIKAFFGEGKETNRDESFYGDFVLAYDILLKVDHIYDAIRNYVTQKPYSKDKFKLYFQNPQFMGGWDKDKETDYRATILRYGSKYYLAIMDKKYAKCLQKIDKDDVNGNYEKINYKLLPGPNKMLPKVFFSKKWMAYYNPSEDIQKIYKNGTFKKGDMFNLNDCHKLIDFFKDSISRYPKWSNAYDFNFSETEKYKDIAGFYREVEEQGYKVSFESASKKEVDKLVEEGKLYMFQIYNKDFSDKSHGTPNLHTMYFKLLFDENNHGQIRLSGGAELFMRRASLKKEELVVHPANSPIANKNPDNPKKTTTLSYDVYKDKRFSEDQYELHIPIAINKCPKNIFKINTEVRVLLKHDDNPYVIGIDRGERNLLYIVVVDGKGNIVEQYSLNEIINNFNGIRIKTDYHSLLDKKEKERFEARQNWTSIENIKELKAGYISQVVHKICELVEKYDAVIALEDLNSGFKNSRVKVEKQVYQKFEKMLIDKLNYMVDKKSNPCATGGALKGYQITNKFESFKSMSTQNGFIFYIPAWLTSKIDPSTGFVNLLKTKYTSIADSKKFISSFDRIMYVPEEDLFEFALDYKNFSRTDADYIKKWKLYSYGNRIRIFRNPKKNNVFDWEEVCLTSAYKELFNKYGINYQQGDIRALLCEQSDKAFYSSFMALMSLMLQMRNSITGRTDVDFLISPVKNSDGIFYDSRNYEAQENAILPKNADANGAYNIARKVLWAIGQFKKAEDEKLDKVKIAISNKEWLEYAQTSVKHSGGSSGGSSGSETPGTSESATPESSGGSSGGSALDFLSRLPLPPPVSPICTFVSPAAQKAFQPPRSCGSGGSKRTADGSEFEPKKKRKV

SEQ ID NO: 514 - protein, 683 aa, synthetic construct
TLNIEDEHRLHETSKEPDVSLGSTWLSDFPQAWAETGGMGLAVRQAPLIIPLKATSTPVSIKQYPMSQEARLGIKPHIQRLLDQGILVPCQSPWNTPLLPVKKPGTNDYRPVQDLREVNKRVEDIHPTVPNPYNLLSGLPPSHQWYTVLDLKDAFFCLRLHPTSQPLFAFEWRDPEMGISGQLTWTRLPQGFKNSPTLFNEALHRDLADFRIQHPDLILLQYVDDLLLAATSELDCQQGTGALLQTLGNLGHRASAKKAQICQKQVKYLGYLLKEGQRWLTEARKETVMGQPTPKTPRQLREFLGKAGFCRLFIPGFAEMAAPLFPLTKPGALFYWGPDQQKAYQEIKQALLTAPALGLPDLTKPFELFVDEKQGYAKGVLTQKLGPWRRPVAYLSKKLDPVAAGWPPCLRMVAAIAVLTKDAGKLTMGQPLVILAPHAVEALVKQPPDRWLSNARMTHYQALLLDTDRVQFGPVVALNPATLLPLPEEGLQHNCLDILAEAHGTRPDLTDQPLPDADHTWYTDGSSLLQEGQRKAGAAVTTETEVIWAKALPAGTSAQRAELIALTQALKMAEGKKLNVYTDSRYAFATAHIHGEIYRRRGWLTSEGKEIKNKDEILALLKALFLPKRLSIIHCPGHQKGHSAEARGNRMADQAARKAAITETPDTSTLLIENSSPNSRLIN

SEQ ID NO: 515 - protein, 683 aa, synthetic construct
TLNIEDEHRLHETSKEPDVSLGSTWLSDFPQAWAETGGMGLAVRQAPLIIPLKATSTPVSIKQYPMSQEARLGIKPHIQRLLDQGILVPCQSPWNTPLLPVKKPGTNDYRPVQDLREVNKRVEDIHPTVPNPYNLLSGLPPSHQWYTVLDLKDAFFCLRLHPTSQPLFAFEWRDPEMGISGQLTWTRLPQGFKNSPTLFNEALHRDLADFRIQHPDLILLQYVDDLLLAATSELDSQQGTGALLQTLGNLGYRASAKKAQICQKQVKYLGYLLKEGQRWLTEARKETVRGQPTPKTPRQLREFLGKAGFCRLFIPGFAEMAAPLYPLTKPGTLFNWGPDQQKAYQEIKQALLTAPALGLPDLTKPFELFVDEKQGYAKGVLTQKLGPWRRPVAYLSKKLDPVAAGWPPCLRMVAAIAVLTKDAGKLTMGQPLVILAPHAVEALVKQPPDRWLSNARMTHYQALLLDTDRVQFGPVVALNPATLLPLPEEGLQHNCLDILAEAHGTRPDLTDQPLPDADHTWYTDGSSLLQEGQRKAGAAVTTETEVIWAKALPAGTSAQRAELIALTQALKMAEGKKLNVYTDSRYAFATAHIHGEIYRRRGWLTSEGKEIKNKDEILALLKALFLPKRLSIIHCPGHQKGHSAEARGNRMADQAARKAAITETPDTSTLLIENSSPNSRLIN

SEQ ID NO: 516 - protein, 683 aa, synthetic construct
TLNIEDEHRLHETSKEPDVSLGSTWLSDFPQAWAETGGMGLAVRQAPLIIPLKATSTPVSIKQYPMSQEARLGIKPHIQRLLDQGILVPCQSPWNTPLLPVKKPGTNDYRPVQDLREVNKRVEDIHPTVPNPYNLLSGLPPSHQWYTVLDLKDAFFCLRLHPTSQPLFAFEWRDPEMGISGQLTWTRLPQGFKNSPTLFNEALHRDLADFRIQHPDLILLQYVDDLLLAATSELDSQQGTGALLQTLGNLGYRASAKKAQICQKQVKYLGYLLKEGQRWLTEARKETVMGQPTPKTPRQLREFLGKAGFCRLFIPGFAEMAAPLYPLTKPGTLFNWGPDQQKAYQEIKQALLTAPALGLPDLTKPFELFVDEKQGYAKGVLTQKLGPWRRPVAYLSKKLDPVAAGWPPCLRMVAAIAVLTKDAGKLTMGQPLVILAPHAVEALVKQPPDRWLSNARMTHYQALLLDTDRVQFGPVVALNPATLLPLPEEGLQHNCLDILAEAHGTRPDLTDQPLPDADHTWYTDGSSLLQEGQRKAGAAVTTETEVIWAKALPAGTSAQRAELIALTQALKMAEGKKLNVYTDSRYAFATAHIHGEIYRRRGWLTSEGKEIKNKDEILALLKALFLPKRLSIIHCPGHQKGHSAEARGNRMADQAARKAAITETPDTSTLLIENSSPNSRLIN

SEQ ID NO: 517 - protein, 683 aa, synthetic construct
TLNIEDEHRLHETSKEPDVSLGSTWLSDFPQAWAETGGMGLAVRQAPLIIPLKATSTPVSIKQYPMSQEARLGIKPHIQRLLDQGILVPCQSPWNTPLLPVKKPGTNDYRPVQDLREVNKRVEDIHPTVPNPYNLLSGLPPSHQWYTVLDLKDAFFCLRLHPTSQPLFAFEWRDPEMGISGQLTWTRLPQGFKNSPTLFNEALHRDLADFRIQHPDLILLQYVDDLLLAATSELDSQQGTRALLQTLGNLGYRASAKKAQICQKQVKYLGYLLKEGQRWLTEARKETVRGQPTPKTPRQLREFLGKAGFCRLFIPGFAEMAAPLYPLTKPGTLFNWGPDQQKAYQEIKQALLTAPALGLPDLTKPFELFVDEKQGYAKGVLTQKLGPWRRPVAYLSKKLDPVAAGWPPCLRMVAAIAVLTKDAGKLTMGQPLVILAPHAVEALVKQPPDRWLSNARMTHYQALLLDTDRVQFGPVVALNPATLLPLPEEGLQHNCLDILAEAHGTRPDLTDQPLPDADHTWYTDGSSLLQEGQRKAGAAVTTETEVIWAKALPAGTSAQRAELIALTQALKMAEGKKLNVYTDSRYAFATAHIHGEIYRRRGWLTSEGKEIKNKDEILALLKALFLPKRLSIIHCPGHQKGHSAEARGNRMADQAARKAAITETPDTSTLLIENSSPNSRLIN

SEQ ID NO: 518 - protein, 683 aa, synthetic construct
TLNIEDEHRLHETSKEPDVSLGSTWLSDFPQAWAETGGMGLAVRQAPLIIPLKATSTPVSIKQYPMSQEARLGIKPHIQRLLDQGILVPCQSPWNTPLLPVKKPGTNDYRPVQDLREVNKRVEDIHPTVPNPYNLLSGLPPSHQWYTVLDLKDAFFCLRLHPTSQPLFAFEWRDPEMGISGQLTWTRLPQGFKNSPTLFNEALHRDLADFRIQHPDLILLQYVDDLLLAATSELDCQQGTRALLQTLGNLGHRASAKKAQICQKQVKYLGYLLKEGQRWLTEARKETVRGQPTPKTPRQLREFLGKAGFCRLFIPGFAEMAAPLFPLTKPGALFYWGPDQQKAYQEIKQALLTAPALGLPDLTKPFELFVDEKQGYAKGVLTQKLGPWRRPVAYLSKKLDPVAAGWPPCLRMVAAIAVLTKDAGKLTMGQPLVILAPHAVEALVKQPPDRWLSNARMTHYQALLLDTDRVQFGPVVALNPATLLPLPEEGLQHNCLDILAEAHGTRPDLTDQPLPDADHTWYTDGSSLLQEGQRKAGAAVTTETEVIWAKALPAGTSAQRAELIALTQALKMAEGKKLNVYTDSRYAFATAHIHGEIYRRRGWLTSEGKEIKNKDEILALLKALFLPKRLSIIHCPGHQKGHSAEARGNRMADQAARKAAITETPDTSTLLIENSSPNSRLIN

SEQ ID NO: 519 - protein, 683 aa, synthetic construct
TLNIEDEHRLHETSKEPDVSLGSTWLSDFPQAWAETGGMGLAVRQAPLIIPLKATSTPVSIKQYPMSQEARLGIKPHIQRLLDQGILVPCQSPWNTPLLPVKKPGTNDYRPVQDLREVNKRVEDIHPTVPNPYNLLSGLPPSHQWYTVLDLKDAFFCLRLHPTSQPLFAFEWRDPEMGISGQLTWTRLPQGFKNSPTLFNEALHRDLADFRIQHPDLILLQYVDDLLLAATSELDSQQGTRALLQTLGNLGHRASAKKAQICQKQVKYLGYLLKEGQRWLTEARKETVMGQPTPKTPRQLREFLGKAGFCRLFIPGFAEMAAPLFPLTKPGALFYWGPDQQKAYQEIKQALLTAPALGLPDLTKPFELFVDEKQGYAKGVLTQKLGPWRRPVAYLSKKLDPVAAGWPPCLRMVAAIAVLTKDAGKLTMGQPLVILAPHAVEALVKQPPDRWLSNARMTHYQALLLDTDRVQFGPVVALNPATLLPLPEEGLQHNCLDILAEAHGTRPDLTDQPLPDADHTWYTDGSSLLQEGQRKAGAAVTTETEVIWAKALPAGTSAQRAELIALTQALKMAEGKKLNVYTDSRYAFATAHIHGEIYRRRGWLTSEGKEIKNKDEILALLKALFLPKRLSIIHCPGHQKGHSAEARGNRMADQAARKAAITETPDTSTLLIENSSPNSRLIN

SEQ ID NO: 520 - protein, 683 aa, synthetic construct
TLNIEDEHRLHETSKEPDVSLGSTWLSDFPQAWAETGGMGLAVRQAPLIIPLKATSTPVSIKQYPMSQEARLGIKPHIQRLLDQGILVPCQSPWNTPLLPVKKPGTNDYRPVQDLREVNKRVEDIHPTVPNPYNLLSGLPPSHQWYTVLDLKDAFFCLRLHPTSQPLFAFEWRDPEMGISGQLTWTRLPQGFKNSPTLFNEALHRDLADFRIQHPDLILLQYVDDLLLAATSELDCQQGTGALLQTLGNLGHRASAKKAQICQKQVKYLGYLLKEGQRWLTEARKETVRGQPTPKTPRQLREFLGKAGFCRLFIPGFAEMAAPLFPLTKPGALFYWGPDQQKAYQEIKQALLTAPALGLPDLTKPFELFVDEKQGYAKGVLTQKLGPWRRPVAYLSKKLDPVAAGWPPCLRMVAAIAVLTKDAGKLTMGQPLVILAPHAVEALVKQPPDRWLSNARMTHYQALLLDTDRVQFGPVVALNPATLLPLPEEGLQHNCLDILAEAHGTRPDLTDQPLPDADHTWYTDGSSLLQEGQRKAGAAVTTETEVIWAKALPAGTSAQRAELIALTQALKMAEGKKLNVYTDSRYAFATAHIHGEIYRRRGWLTSEGKEIKNKDEILALLKALFLPKRLSIIHCPGHQKGHSAEARGNRMADQAARKAAITETPDTSTLLIENSSPNSRLIN

SEQ ID NO: 521 - protein, 683 aa, synthetic construct
TLNIEDEHRLHETSKEPDVSLGSTWLSDFPQAWAETGGMGLAVRQAPLIIPLKATSTPVSIKQYPMSQEARLGIKPHIQRLLDQGILVPCQSPWNTPLLPVKKPGTNDYRPVQDLREVNKRVEDIHPTVPNPYNLLSGLPPSHQWYTVLDLKDAFFCLRLHPTSQPLFAFEWRDPEMGISGQLTWTRLPQGFKNSPTLFNEALHRDLADFRIQHPDLILLQYVDDLLLAATSELDSQQGTRALLQTLGNLGHRASAKKAQICQKQVKYLGYLLKEGQRWLTEARKETVRGQPTPKTPRQLREFLGKAGFCRLFIPGFAEMAAPLFPLTKPGALFYWGPDQQKAYQEIKQALLTAPALGLPDLTKPFELFVDEKQGYAKGVLTQKLGPWRRPVAYLSKKLDPVAAGWPPCLRMVAAIAVLTKDAGKLTMGQPLVILAPHAVEALVKQPPDRWLSNARMTHYQALLLDTDRVQFGPVVALNPATLLPLPEEGLQHNCLDILAEAHGTRPDLTDQPLPDADHTWYTDGSSLLQEGQRKAGAAVTTETEVIWAKALPAGTSAQRAELIALTQALKMAEGKKLNVYTDSRYAFATAHIHGEIYRRRGWLTSEGKEIKNKDEILALLKALFLPKRLSIIHCPGHQKGHSAEARGNRMADQAARKAAITETPDTSTLLIENSSPNSRLIN

SEQ ID NO: 522 - protein, 683 aa, synthetic construct
TLNIEDEHRLHETSKEPDVSLGSTWLSDFPQAWAETGGMGLAVRQAPLIIPLKATSTPVSIKQYPMSQEARLGIKPHIQRLLDQGILVPCQSPWNTPLLPVKKPGTNDYRPVQDLREVNKRVEDIHPTVPNPYNLLSGLPPSHQWYTVLDLKDAFFCLRLHPTSQPLFAFEWRDPEMGISGQLTWTRLPQGFKNSPTLFNEALHRDLADFRIQHPDLILLQYVDDLLLAATSELDSQQGTGALLQTLGNLGHRASAKKAQICQKQVKYLGYLLKEGQRWLTEARKETVRGQPTPKTPRQLREFLGKAGFCRLFIPGFAEMAAPLFPLTKPGALFYWGPDQQKAYQEIKQALLTAPALGLPDLTKPFELFVDEKQGYAKGVLTQKLGPWRRPVAYLSKKLDPVAAGWPPCLRMVAAIAVLTKDAGKLTMGQPLVILAPHAVEALVKQPPDRWLSNARMTHYQALLLDTDRVQFGPVVALNPATLLPLPEEGLQHNCLDILAEAHGTRPDLTDQPLPDADHTWYTDGSSLLQEGQRKAGAAVTTETEVIWAKALPAGTSAQRAELIALTQALKMAEGKKLNVYTDSRYAFATAHIHGEIYRRRGWLTSEGKEIKNKDEILALLKALFLPKRLSIIHCPGHQKGHSAEARGNRMADQAARKAAITETPDTSTLLIENSSPNSRLIN

SEQ ID NO: 523 - protein, 683 aa, synthetic construct
TLNIEDEHRLHETSKEPDVSLGSTWLSDFPQAWAETGGMGLAVRQAPLIIPLKATSTPVSIKQYPMSQEARLGIKPHIQRLLDQGILVPCQSPWNTPLLPVKKPGTNDYRPVQDLREVNKRVEDIHPTVPNPYNLLSGLPPSHQWYTVLDLKDAFFCLRLHPTSQPLFAFEWRDPEMGISGQLTWTRLPQGFKNSPTLFNEALHRDLADFRIQHPDLILLQYVDDLLLAATSELDCQQGTGALLQTLGNLGYRASAKKAQICQKQVKYLGYLLKEGQRWLTEARKETVRGQPTPKTPRQLREFLGKAGFCRLFIPGFAEMAAPLYPLTKPGTLFNWGPDQQKAYQEIKQALLTAPALGLPDLTKPFELFVDEKQGYAKGVLTQKLGPWRRPVAYLSKKLDPVAAGWPPCLRMVAAIAVLTKDAGKLTMGQPLVILAPHAVEALVKQPPDRWLSNARMTHYQALLLDTDRVQFGPVVALNPATLLPLPEEGLQHNCLDILAEAHGTRPDLTDQPLPDADHTWYTDGSSLLQEGQRKAGAAVTTETEVIWAKALPAGTSAQRAELIALTQALKMAEGKKLNVYTDSRYAFATAHIHGEIYRRRGWLTSEGKEIKNKDEILALLKALFLPKRLSIIHCPGHQKGHSAEARGNRMADQAARKAAITETPDTSTLLIENSSPNSRLIN

SEQ ID NO: 524 - protein, 683 aa, synthetic construct
TLNIEDEHRLHETSKEPDVSLGSTWLSDFPQAWAETGGMGLAVRQAPLIIPLKATSTPVSIKQYPMSQEARLGIKPHIQRLLDQGILVPCQSPWNTPLLPVKKPGTNDYRPVQDLREVNKRVEDIHPTVPNPYNLLSGLPPSHQWYTVLDLKDAFFCLRLHPTSQPLFAFEWRDPEMGISGQLTWTRLPQGFKNSPTLFNEALHRDLADFRIQHPDLILLQYVDDLLLAATSELDSQQGTGALLQTLGNLGHRASAKKAQICQKQVKYLGYLLKEGQRWLTEARKETVMGQPTPKTPRQLREFLGKAGFCRLFIPGFAEMAAPLFPLTKPGALFYWGPDQQKAYQEIKQALLTAPALGLPDLTKPFELFVDEKQGYAKGVLTQKLGPWRRPVAYLSKKLDPVAAGWPPCLRMVAAIAVLTKDAGKLTMGQPLVILAPHAVEALVKQPPDRWLSNARMTHYQALLLDTDRVQFGPVVALNPATLLPLPEEGLQHNCLDILAEAHGTRPDLTDQPLPDADHTWYTDGSSLLQEGQRKAGAAVTTETEVIWAKALPAGTSAQRAELIALTQALKMAEGKKLNVYTDSRYAFATAHIHGEIYRRRGWLTSEGKEIKNKDEILALLKALFLPKRLSIIHCPGHQKGHSAEARGNRMADQAARKAAITETPDTSTLLIENSSPNSRLIN